United States Patent Application Publication US 2022/0008368 A1 - sequence listing, part 17

SEQ ID NO: 2 - DNA, 58617616 bp, Homo sapiens (residues 34,736,369-36,907,391 of 58,617,616)
  modified_base (1)..(60000): a, c, t, g, unknown or other
  modified_base (24448981)..(24498980): a, c, t, g, unknown or other
  modified_base (24552653)..(24552752): a, c, t, g, unknown or other
  modified_base (24891257)..(24891356): a, c, t, g, unknown or other
  modified_base (24895791)..(24895890): a, c, t, g, unknown or other
  modified_base (24898314)..(24904771): a, c, t, g, unknown or other
  modified_base (24908590)..(24908689): a, c, t, g, unknown or other
  modified_base (27190875)..(27240874): a, c, t, g, unknown or other
  modified_base (58607617)..(58617616): a, c, t, g, unknown or other
agctatgattatgtcactgcactccagcctggcggcagagcaagaaaaaagtaacagctaaagtgaactaatgccaaaatcattcattggttcatcttctaaacacttaggaagtatctgttaggaaaagttgtacatggattttggtgtacactgacacacaggacttcatgatctagtgcagtattgtctaagagaactttctgcagtggtggaagtgctctgcatgtgtactggtcagtacagtagccaccagccctgtatgactattgagtacttgaactgtggcttaagcaactgagaaactgaattttaaactttacttattttatttttacattttaattaatttaaatgtatgtagccaaattgcctagtggctactgtattgaggattgcagcactggtagaaaagtaagaaagcataagaaattaaaataaatgccaggacagataggctatgttcttttggggacagagatgagtgaacaccccaggctgcccagacaactgaaggggaagaaggaagcatccctggctctaacttgtaataacctgttcatcataaagctatgagaaatgtttttttgatttgggataaagggaattaactaacacagtggcaactccaattaacaggtgaatttaggataaattatgtgtagcaaattgaactgtaaggtcttacttgattatttggaaaatgtatgtattggattgtatctgcttggctataaaaaagagatttcttcctgtccttttaatctcattagtggattgcctgtgaagtgcatcacagttgatttagtgattattaagtaataaaactgtgttctttttttctacatttgtggagaggattttctgccattggcaggagatttgaattttaattattttcccaacacctggcaaaaataaattctgcctttaaaaccaaagacgagtatcactggtgaacatgcatgcaaaatatccaaataatgtaatacaatgctgaattaactctcagagctaaaaaattaccacaggcaagcagtctgtttcacaaatcaaagacagtaataatgctgtattaaatagatgtattttttgtacatattataatttgactagccaataaactattattgaatatttaagcttccaaagttttactaaaaagtaatattgtgaaatgagtactattgaaaggaatttctaagccacatctgtgaacatttccttattttctttgaaacgtacccctttatttttttccctttactttcaggtcttatttaaggactatctaaggcagtggtgcccaacctttttggcaccagggatcggttttgtggaagacagtttttccacagaagcaggaggtggtggtttgggggtgaaactgtttcacctcagatcatcaggcattagttcaattcacataaggggcgtgcaaccttaatcccttgcatgcgcacttcacagtagggattgcgctcctatgagagtctaatgccatagctgatctgacaggaggcagggctcaggtgataaaagtcatttgcctgccactcatctcctgctctgtggcctgatttctaacaggccacagactggtaccagtggttatgtacccctaaccatcaggggattagggacccctgatctatggcatgaaaccatccttcagtcttttcacccaggggtctcatattttaataattgtctatcagtacaaagtttaagtatacaccataaatatatttttcttttttgtttatgaatcagttatgtgtatattttagtccattggtgctgctataacagaataccacagactgagtaatagaaattgacttctcatggttttggagcctgggaagtccaagatcaaggggcaggcatccagcaagggccttcttgctgtgtccttttatggtggaagggcgaagagaagagagagaaccaaaaaggggcccaaactcattttttaaataaggaagtcactcctaatgatgatgacattaatccattcatgagggcagagccctcaaggcctaatcatctcctaaggtctcacctctcaaaactgttacagcggcgattaagttcaatacacgcgttttgggggtcacaatcaaaccataacagtgtatgtctattagtctttaatataaaggttttttttttgtttttgtttttttttttgagacagagtcttgttctattacccaggctggagtgcagtggcgcaacctccgcctcttgggttcaagccattctcctgcctcagcctcccaagtagttgggattacaggtgtgagccaccacacccagctgcccattttttgtgagccttagtggatcatcctgagtatcccatttgagagacaatcactttaccctcattttttaattacttacctagcagttaagctgtaaaagatataactaaatacttgactctgtgctgtcaaatgtcaaatgctgatttttaaaaattcatgtatttctgtaacttttagcaaaattaactctactgaagcaaagctctcatatttgtttctcacctttattgtataataattctaagcacataactgtcccccttattgtatagtaattccaactacataactgtcctattattacttaactgagatcacattcccaatcattgccacaactcctgaatcttgttccatttctcccacaaccaggctaattttaccctttcttcagtgacagaagaggcctgggctatggctgagcctaaatatgtttgctatttcaggtgacatttaatgatgtggctatagacttcactcatgaagagtggggatggctcagttctgctcagagggacttatacaaggatgtgatggtccagaattatgagaacctggtctctgtaggtaaggatattaccccttccactccagtaggggacacctttcttttgccaccctgaattgctggagaccctcctaagtaaatggctgaatttctgtagcatgttcccaaggaaatgtgcagctctgttgtgccctgcctgaagcttatctttccatttcgatgaatacccttcatcccttcctgtggtccctcttgtgatggcctctcataatagaggaccacggcttaaacaattctgtattcttcctgtaagcaggtctttctgtaactaagccatatgtgatcacgttattggaggatggaaaagagccctggatgatggagaaaaaactgtcaaaaggtatgattccaggtgagtcatggtgaacgagacaaaggaagattttgttaaaaagggtcccaaactctttatagtgagtttatagtgagtgtggaggcattttaggtatactgttttcaaagatctcagatagaaatgaaaaattgtgggatatttagcttagattttcaaaacaattgttcctctatcccaaattattatctgtatcactcatgtcatccaatcaaggttagaggtttttgccttcataataattcaattgttactctattcataacagtaaggcaaattattctttcttaaatctacttaaagaaaaacatactgatagttttaggctaagaaaagctgtcaattagatgggaaatcacttttctaaagctgagcgttgtagatgaaatatgaacatattagaggaaaaaatgaacatatataaatatgtttctaggaatattttctaatgtccaataaatgacatgattcacacagtttcttcataacttcagaaagcctaaatctttgtcagctataaagagcatttagattattgtgtttttactgcaactgtttaataacatcaattctgtattttaagcatgttaatctggcagcaaattgagattaattgaatgttggagaaaaaggctatgagacaaaatgcaatctttcatacatgcatataggcacaaaatgatggcttggaatccagaatgccttccacattttatttctgataacttcctttttttccatactatttcatccattacatatatttttcccatttccattatcacactgtgttcccacttctgtgaactctgtattctctgctccatttgagcactgttcagaaatcattgaaatatttcagttgtcagaactatgtgttttctgggggcttcatttctaatccagttctcctaattccaatttagaagtttcttttcaaatagttaaaaaaaaacaaaacagtgctttgcttttttgatgtatttcagattgggaatcaagatgggaaaacaaggaattatcaacaaagaaggataattatgatgaagattcaccccaaacagtaataatagaaaaagttgtaaaacaaagttatgaattttcaaattctaagaagaatttggaatatatagagaagttggaagggaagcatggaagtcaggtagaccatttcagaccagcaattctcacctctagagaaagccccactgcagacagtgtttacaaatacaatatatttagaagcacctttcattcaaagtctactctttctgaaccacaaaaaatttctgctgaagggaattcacacaaatatgatatattaaagaagaacttaccaaaaaagtcagttataaaaaatgagaaagtcaatggtggaaagaaacttttgaattctaataaaagtggggcagccttcagccagggcaaatctcttacccttccccagacttgtaatagagagaaaatctatacatgcagtgaatgtgggaaagcctttggcaaacagtcaatcctcaatcgccactggagaattcatacaggagagaagccctatgaatgtcgtgaatgtgggaagacttttagccatggctcatcccttacacgacatctgataagccatagtggagagaaaccttacaaatgtattgaatgtgggaaggcctttagccatgtctcatcacttactaaccatcagagcactcacactggagagaaaccatatgaatgtatgaactgtggaaagtcttttagtcgtgtgtcccatcttattgaacatctaagaattcatactcaagaaaaactctatgagtgtcgtatatgtggaaaggccttcattcataggtcatctctcattcaccatcagaaaatccatactggagagaagccttatgaatgtagagaatgtgggaaagctttctgctgtagctcacaccttactcgacatcaaagaattcacactatggagaaacaatatgaatgcaacaaatgtctgaaagtctttagtagcctctcatttcttgttcagcatcagagtattcatactgaagaaaaaccctttgaatgtcagaaatgcaggaaatccttcaaccagcttgaatcactgaatatgcatttgagaaatcacattagattgaaaccctacgaatgcagtatatgtgggaaagcctttagtcataggtcatccctgcttcaacatcacagaattcatactggagagaaaccttatgaatgtattaaatgtgggaagaccttcagctgtagttcaaaccttaccgtacatcagagaattcacactggagaaaagccatataaatgtaatgagtgtgggaaagcttttagcaaaggctcaaatcttactgcccatcaaagagtacataatggagagaaacccaatagtgtggtaagtgtggaaaagcctttagactatatgaatcactatacatgtgagaaatcttacagaagagaaactgtatgaagcagtggttatcatggtaaatttcctagattctcccttatttaacattagaaaaatttatactggggaaagtcttatgaatgtggtgaatataggaagaccttttagcaaagatgcaggccagtttgtttattagactttatactgtagagaaatcatatgaagaccataaatgtgggaaagcctttgtcagtattaatcccttaattgacataagtatactcacactaggataaaaccctgtacatgtagcaaatgtgggaaagactacagacaataggaatcttttacaaactcctacaggagagaagctgtatgaatgtagaaaatttagaaattgagggaagtcttcagttccaagtatatcccttattctacagcagagaactcaaaatggagagaaatctcatttaagagatgtagcaaagtgttcactaagagtgtttatcttggtacacatcagaagattaatggtagaacaacctgaaggatttaggagttatgtgtaaatctttgcagtcatgctatttgtaaactggattctacaggagagcaaataaacattataataaaatatgcatttcttagagcagtagcttgcagtttcagttgagttctacttagaaattctttttagctagtgggcatgtgaagatatttagtcacccagaggagccagtaagtgttataatattgaaaattaaagctgcaaaagaaataaagtgatgttaataaaagttttggcatctaataaaatcattttgtatatcacaaactctttcactgtgactatttcctgtaaaaaaaatttcactaagattagccttagcgtagcctttagtgggagactagcaaacctagagaaaaatgacctgctctttatactaagaatagcagtattttgatgaggattattcagagtcaatttccagtaggcttaatcaaatacatttcaaaaaaatttactgagcatcactcgtgtattattacacagcgatgggatataggaatccagtagttctgagctttagtggtgtgtcaaagtcagtaggagggcttgttaaagcacagattgctaagtctgaatcttagggtttctgtatgagttgatttgaatttgcatttttcatgcgttcttaggcgacacactgtccagaaagcacattttgataaccattgtaataatgaacaaaacaaatctgatctttttctcgcagggatgttatctgacaagaaagatggatagcaaataaatttgaaataatggtttacaagtgctatgaggacataaccaagaaacaacatactacaagagatcagagcaggcttagcgagatgtgatttttgaaatgaatcctaaatgatgaacactaattatgtaatgagtactactcatgtagccatgtgcatccctgcatgtgcctgtgcgtgtgtgtatgcggtgtgctgggtgttaatctaggtaaagcagacagtcgagttctgtcatacttgctgcagctggattccacgttcccatgtctagtttcagattctgtggctttgaggtagtgctgctggcagcatcattgcagcaaccgtcatttctctatccctgagtcatagttacgggagtttaccttgaaatcactagcccagaagtgttctcattacttttacagcccacctaccaattttgaaagcactaatttgcagcaatatatgtcttgaaatagttaagagagattttgttctctgcactgaaccttgacagataattatgttttgtaaggaggcaggatggcttcaaatattctaagttctagataagaaatggaacagtctcactggccctgtgattagaatcctatcttgtgattagaaaggtaatgcagatcaatttgatttggagtgtatggacactgatgcaagtgaaggggtgtgatatggattatgcttcagattttgttctttatctcaggtgagagtagtaagatatgttattttaaaaaggaacattatgttatagttatgataattctggtgtggaatgagtgataaggtttctgactttcaacaaaatgtatctcctctgatatatgtgctaccttaacagaaagccaaagcacagaggcatattccaatagcaatttgcaagagacagtaggtttggaatggggtggtaaacttttactattttgcagggattttatctttcatttgatttatttttaatcatgaaatttatattgaaattctgtgaaacattgaaggatctttggaagatttataattagggaagggccagatgtagtggctaatgtctgtactcccagcactttgggagaccgaggcaggaggattgcttgaggccaggagtttgagaccagcctgggcaatatagcaaaactcattagtctgttaaaaaaaaaaattacccaggtgtaggcacacatctgcagtcctagctattcaggaggctgagtggggagggattgcttgagtacaggagttttaaggtcacagtgagctatcatcacaccactgctttccagcctggacagcagaacaccaccctgtctccaaagtaaataaatacaattaaggaagcatgatgtggtatcagacagttgcaagtatggatagactggctaccacatatatacttatgggataatgagagtagctttcttttctctcattctgtgtcctttctctgctctcccaagcaactggtaccacagagatgaagtagtcctataatgcccagattttgtttccactacacatagtttaatgctaccatgtcactttgttatgagaggattcatcgaaatacctgtgctttgtcatttaaaaagcatgggcatacacatgataatgctttacgtttctggatttaaagtgccttcacaatacagaactaggaaaaagaaggccatctttttaaatgaagatagttttaagagagcaataagagactattactttgttatgatagaaggttgggctgatgtcataatgatgttatgatgtcactgacatcatattatttcctcagtcatacctattaaccatttcttgagcatccactatgggcttaatagataagaaacactccataccctttaagagccctgaggtgtgtgtgtgtgaacagcattaaactttggagtcatgttacctgggtttaaatccaagttgcatgaatactggctttgtgtgaccttggacaaactatttcactgtgtcttgcctcagtttctccatctgtaaaatgataataaagctatctcacagcattattatgaagattaaatgcattaattggtgtaaagtgtttacaacaatccctggcctctcaatagcattcaataagtattagctattgattacatcatcattgtcttctcatggttgcttcatcattctggtctcaaaggtcacatctaatcacttgtcactcccatgtgtttactgtttaacatttttagaggagagctcttacaaaaccccccgattaacttccaacaaattcttgagtatctgagccattttgagggagggaatgtttcttgccctaaataatctgaggagaaacaaagagaccaggtaggagatgagatgggaacctagcaggtctatgggaaggaaggagggtgccctacagatttggaaaacgggccgagtgaaggaggcatcaggcttccacatgaaggaaaggggaggctctacccagagaccagaagcctacaggtcttcatcatcatctctgaatacagagtcctgtgggctgggtgccactgctttcactcttcctaaatggaggttagagcctgtcattgaaggtcactgatgcctggaaagtcaaacagtttccttgttagccttgggccagtcagatgtgattagagctcagttgttggtaaacatctagaaagaagcaaggcacatatcactgagcacttcctgggaacttatttttttgctgctgagggggagtcagtctttaaacaaattgcaattgtgttagagaaaaaagctttatatgcaaaagtaattgatgcaagatacaagacaatgacaaggccatatggcccaagaggtgcagagtgtaagcactctggcatcaaagataaatagggaaaaactataatcataatacaatactgttaatagcagcagcaactgggccttgtgtttgcactgtgtgctgcattgagacaattaaatgttctatgctctggatccaaattcctaggtgtgaattcagcctattgggactgtcgcttgcttactctataaacttggtgaagtcacttcatttcccaatttttccatcaaaacaaaaacaattcccatcttaccagctggttgtaagaattaaaagatttataaagcaagcaacaaagtgcctctgcatggaagtttgttgccgtgtttttcctgcttttaataatcttcccacatactgtaaggtaaatgccataatcatcttcatgctagtgacctgagtctctctcagagtcacacatcttaggaatataggctacatttgaacattcagtaaaagaccacacaatattgccctcctaggacagatctcagaagactggggtttctcttggcaaccatacaggctctcttggcctccctgaacaaaaaaatgtctcctttggccatgctgttccttctgcctagaatgtgtcccataccccatttattaccacgcttacctgccgagggagtcctgcctaccttgcaaagctcactaggtgtgtcaaagatgaacaaagctggacatttatgacagtggggagaacggactttaattggtaataactattgcaatggggaaaggaatttggcatgaactgaacccagctttgatttgtacagaggtgaatgagtatgttaaaggaagggtgaggaaatagggagggggtggagaagaggggctcagtagagtcagaaaagtgaaaaattacaaaacacaggaagggagggggctggtctatgtgcagtctatctgggtttgctactggcacttgaattaggatcctatcctcccacagagactgtgagacaggggtcttatcttcaggtgttggctggaagaaattctttggacagccttgagtttttcaggccagcactttaaaagttattagaaagtgttagtgttgttcaagtcttaataggcaaaagttgacaggcctattaaagaaggctcagaggggcctagctagagtttggtgaaagaaagagaaatctttgtcaggtatcacctcaggcttccccagcccactgaggaggaatggtggtgaagaagaagaaagaacaaaggctcaagggctcaacatacaggatgtgagtttccgccaagagttgtgtgaccctgagaagataacttaagttttccaaacctcaggttccttttctgtaaagcaggaataatagaacctaactctgaggaaattgggattaaatgaagtgctacataacaagttaccctcagaactcaataaatgtagttattattgttacttagcctctttgcttccacaccaccctggaaaaccgaaccaagtcctgatctctacttttgtaagtgtgccacattctctgcacaaagattccagaagatgagaaatacttaatctagagctagcaaggccaaagggaaaaaaaaaaaagactctcctagtaggtgacattgacattggtgcagaacagggaaggatgcaaaggaggagaggagagggagaggcactgcagagatctggactcagtgtcccaggcagagagaaacactgggaagtgggaaagagcttagaatgatcaggacagcttggcaggagagcagtgagcaaaggaagatggagtagagggcagatttataggcctaaggatgtatctccctagaaatagcatccagagggatgttccttgcacagtgctgggcactgggaacacacatcacacattagccatctctgatactctcatctagaaagaatgatggttaatatttcccctttaagccttccttgaggaaaatggaggtgaaggatagcaagatagcttgcacaaggccacagccctgagatagggtacagcatgatccaaacatgtctctggattctgcaggccatgcctctcccaaggatctgcacatgccactgtacatgaatgggggatactaagaagttatagttcatacttccccaccacataccaccaattgccaagaaagaggaactttcttttgtaatacttgatttaattctaggactctggactgagagtgaccctatcagcaggaagagaaggcctgaagaatcccaggatgccacgatcctccatgtcagcatgccacagccatgtggttgagagtccaagaatgtgagactagttaacacacctgtgctaggagggaggcgactgtatcagtacttcactcagctgaactctctcctaggccctacaaaggtgtctagatgagtcctatcctccttactggccttcctagcttggtcccaaagagtcacctgctccccctgggtggtgtggtcagacaggtcatgtgacaaatgaaagtccactgtagcagtgccaatagtgcaggccacaataatgcaggctgcaggaaacactcctgtcctaggctctcatttgggcatatgaagcacatccttctaggtaatgtagctcttcatattcttcgaggcaatggctaagtagcacccagagggccactaggaatgagcatcaaaagactcttatgaagagagtggtacttcatttcttaaaggtgagtacccagttttccatattttactgcctgcaacagatcacataaatatttagagacatattatttcagatactataaaatactacaaaaccaaatatgtggagtatgatttcagggaaaatgaccaaataggaagtgccacgaatctgccactgtacctgaaaaactattctggcatctttctgaagtaactatgttggaactccagagtttacctgaatgcttgtaatttccagcttgcctaataaattacaatttgtgttgattgcagccatcagagtggtattggctacacattcctcactcccagctccatggcaagcagctttggggatgggaatgtcattctggtgcagatttctggagccagggtgggcaataagtcccttatcccacagatactgaggttttgtgttctgactgtggattggtgcttctgatcttgtgggcttgtaggctagtcatcattgtttcaacccccactggatgaagtgtcttttcacagatataaaagaattgcacctatttttttgtttgtcttcaaaaacaactacatatacggaagaattcagaaagccacctcacatgcccatggaaagatgcaagcactgaaaagaccttcttcagttttcactttaggccgatctctggcacataattatcccataataatgaaaacagaggcaaaaatgcagcaaatccagggaaaggtggcgggaaatatgatttccagagttaccacatggtaagattcaaatgcccagtcttctacaacaacaaaaacctgaaggcatgccaaaaaaacataaaagtatggcccaattaaaggaacaaaatgaatggagggaaaacatacttgaggaaacccagatgtcagtctcgccagaaaaagacaactgtcttaaagatgcttaaaaagctaaagacatgaacaaaggaaaaagatgtatgagcaaaatgaggatagaaataaagagataaaatgatttctaaaaagaacaaaaaacattctagatcaaaatttacagtaatggaaacaaaatatgaatacaataaagggattcagaagacatgcaatcagaggagagattcagcaaacttaaaaacaggaaaatacaaattatcaatataaaaaagaatgaggattggaactttagcacaacaacaatttgggaatccctgaaggggaaaagaaagaaaggggcagagaaaaatacttgaagacataatggctgaaaaatctccaaatttgatgaaagatatgaatttgccaacccagcaagagttcaccatgaatgaactctaagcaggagaattgtgaagagacccacactgagacacataatcaaatgtcaaaagccaaagacagataatcttgaaaataggaagagagaagcaactcctctcatataggggatcctcaagactattagccagtgtctcatcagaaaccttggaagctagaaggaagtgggtcaataaacgtaaagggtgaagaaaaaaagctgtcaatagagaattttatattcagcaaaatgttcttgaaaaattatggagaaattcacatattcccagataaacaaaagtggagggagttgattatcactagacctgctctgcaaaaaaaaaaaaaaaaaaaaaaaaaggctaaaggaggtctatcaggttgaaattaaaagaagctaaaatgtacccaatgacaaaactccatggacataatcagtactggagctcaaattacagttataccgggggatcccattaaatttaagcattgtgcctctcctatcttaagaaagtcactatatataaaatagagaaaaagtaggaatgcctcactttaaatgtagccttgcctatatttcccaagtcataatacccattgccctaatatatcccatattggagcatagatgctctaacataaatcataaattaaggtaggtcttttacaaactggcttgataaaatgggaccccatgaatacccagttaaaatagttaatctggtccaatatagggtacaacagggccttcaagggttaaacctaattaataaaaaggcaattatcccaactgcttctctatttgatatcccaatcttgcctgttaaacctgggggataaaaaaagggtaaagtgcctcatggtgcattactataaccttaacaatgtgttcctaccaattagggcccccatacaaaacagctaatattattaaaattactgattctattaaatcaataatgagcaaatattttgcttttatagatttggagagtgtgttctgttccaggcccatttcaatagcctctcaactacagttcaccttcatttctgaaggaacacaatactcctgtttcaggctacctgtggggtacctcagcagctctgccatcacacacagtctttgcaagatagatcatagctgcatccatttttctccaggagcacagggtggaaggctggatcgagggtgcttattttccttggactcaatgaccatagagactgtcccatgcttcaggcagctactcatctgctatggcacccatttgagcctagacttccacaaacaaaaacagaagatctgttgaatgtactgcacactgttctggtaactattggtctccttactgctgattgggatgattcactggttttcaattcagaggtctaaactccccaaataagcctcaaccaaacatggcaaatgctgagttgcacatcaacttgagagggtacccatttaaaaaggacacccaagtcccacatctcagatgatttcacccttgcccagaagctcactgctggagatgacactgccccagcccaagtctttgccattgtagatgactttacctcttgtgccagggacaacttcaccccagatatgaaaacctctgtcccagtggtgcctatggagtgcctctcctaaggcatgcattaaacatggggtatttatgcttttctcccttggatgttaaaggttctactatgtttctgagcttgctgtctgcctaacctatgattctggtatattccttgctctttgccaaaatgtacaccctacacttccatgtctaacaggaaatctagtagaggttactactatctatgccgttctaaaaattagtggaaattactgctttcctcgggaggcatctgcctcaaatcagtcaaccccttctccccctagaaagagtaccatttactccctgatgccttttctactctcaccttgcatctcctactatgatcactctttccccttgatcacacacaaataccactaacctttacatatacctatcatttcatacccttccaacattacaactgccaaacttgtcactttgacctgaacatgtttctaatgcacttaataacactaccaagatattgttagtgaccctaaagatttcagaactactgtcttggataataccatataaccaaatttaaaaactcccaaagcgccatttgcttaaatctaccacctgccttcattcctcaccagggatggctacatgttatgaccaagttaacctatgggcttaccacttgtgcccaggagccaaccagcagtggccaattccccaccccgaggccttcaccctccttacaatgatactctcatgggtacactatactctgaataatggcacatttggttttttttgtggcttgaaatcacaggcacagcaccttatgtatttttccttgccaatcaccctggatgttttccctaataaaatctggtaaatagtgtttacactggggattgccatggttctttgtccacttggtacttccctgtttccattaacccaaagacacaaggcaaaatgggcagtgtttatccctatcttaataggacttgccataggcacaggagccaccactgctgacaccaatacagcaggctttgtcgaataagatcaaatcataactgccaagcagcgtcattacgtggccctttcagatcatattcaaaggctgtacaaaatactgtccttaatacaacaagcccatgagtctctagctcaaatggcaatagataacaggctggctcttgactattagccagggaaggaggagtttgtgccactcaggatacctcctactgtatgtacattaataactctggacaggtacaggccaactatgaggaacaggtcaaaaggtaaaggtttttcatgacttagccaaatattccaacagattcccttaaatccaggggtgcctggcccattctcttggctttcctccacaaagtgggatgccgtgttacaaactggataccaaaccctcatcatatgcctaataggactcttctgagctgttacctttattaaagtttaccttcagtggctaagtcatgctgtcccaggcacctttaacatcacaacccaggtggcaagtgttatccatccgattagtattgtaatgatgttgaggcaccacagggcaaactgtaatgtaaattttaaagcactgtattttcctgctgcctcggtatccccacaaacaggctgtgagccccccagccagctataccagtgtgattaggctggccctgccacaagttctgttgtgctgtttgtgtactccatcctggctgccaataaaggcacttccccataggtcttcattctcttggctccctaacagctcagttgagccagcctccttgatgctgtctgtgcccccttggttcccttggtgtgcaatgactctctctctaggacctgtaagtataataaaactttgttctttgacaagcctctcctgcgtttcctcctctgcctacacctgactgacagtcctatgagcacacaatttaaatagttctaacaacacaggaatcatgcaaaatattcaatccaaaggcagaagtggggtcgggggagaaaataaagagaatagattaaacaaagagaaaaaccaatagcaaaatgataaattgaaacccagcaatataatcacactaaattcaatgacctaattaaaaggcagagattttcaaagtagataaaatgcaagatccaataatatttcgtacaagaaaaccattttaaatataatgacaaaaattaattaaaaatcaaaggacatggctgggtgtggcggctcatgcctgtaattccagcactttgggaggccaaggcaggctgatcacctgaggtcaggagttcaagaccagcctgaccaacatggagaaaccctatctctactaaggatacaaaattagcagggcgtagtggcaggcgcccgtaatcccagctacttgggaggctgaggcaggagaatcgcttgaacctgggaggcagaggtcgtggtgagccgagattgcgccattgcactccagcctgggcaacaaaagcgaaactctgtctcaaaaaaaaaaaaaaaaaaatcaaaggacacagatacaccattgtaatagtaagcaaaagagcactagagaggctgtattaatattacacaaagttaacttcagaacaaagactattacctaaatatttatatacctaatgaaagaacttaaaaatgatagatatgcaaagagaaatagacaaatccataattacagtagtttttttaaaaaagaaaacaccattctctacataagtgacagaacaagtagaaaatcaggactcagaagacatgagcaacactctcgaccatattgacttacttgacatttatagaacacccaacaagatcagaatgcacactattttcagtaataatgtgtaaacattcttccaggatagaccacattccagatcataaaacaaacctcgacaaatagaaaagggttcaagtcatgcaaagtatgttctcagaccataatcaaacttcatagatcaaagaagaaatcaaaagggaaattaaaaattattagaactgattgaaaattatgtcagaatttatggaatgctactaaaccagtatctggagtgaaatttatagcattaaaggcctatattagaaaaagaatgaaaggtctcaaattaatgacctcagctttagaaggttgagaaattctgacccaagtgtaaaacatacaactgttaaatttttagaaaaaaggaaaaaaaaattttgtgtatctgctaaaatcatcccatgacttcacatagcaattagaattaaatccaaatttcatggtaccctatctgtgcatatggcctgctactccactccatcattaatttctattctccctgtcaagccacactacattgagctgtatcctccaacagtccaagctcttgtcacccttgaggtcttggatatgtggttctctcttcgggactcctgtatgcttcctggttctgcatatcacctaacagactgtaggttcattttcccatgtgtttaatgtccaccttcctactcttacagagagtaacacagctccatggagaagtgcatggccaaggtcacccaatgggtcatggaaacactaaatgatccgaaatcccaatctatcatctaggctcttagccaccaggctcaagataggtacagccacagctacagcagaggtggtcactgtgagggaggatggggtcttcagctcttcccaatgagtagaaaactaaactgctatctgtatatatgattgtgaattctatatttgagaattcacctactaaaattttgttataactccaaaatcaatactttgaggtttttgcatttttgcagtcatttgcagacatgtgcagagtgatgaaaaaaatgattcatcaagcctgcatgtcaccagctgaggtcaaaggtgatgcctactttcttgtttcggcattcataatgtcgtgtcattttcagtcatttagtgcacaatggctcatgcctgtaatcccagcactttgggaggttgaggtgggtggatcacttgaggtcaggagttcgagaccagcctggccaacgtggtgaaaccccgtgtctactaaaaatacaaaaattagccaggtgtggttgtggttgcctgtaatcccagctacttgggaggctgagacaggagaattgcttgaacccgggaggcggaggttgcagtaagccaagttcgcaccattgcactccagcctgagcaagaagagtgaaactctgattcaaaaaaaaaaaaaaaaaaaaagattcattcagtcatgagttatactgctgttgtctgagagttcaatgtctacaaatcaacaacacaatacaaccagaaataggaggaggaaattcacctgtctgtacatgaggcagctcctaaaagtataaaaaggaacatctataatgcataatgcatgatgaagttatagaaaacatgaaaaaaggctaaatttatgggtgaatcagatgatgaccaatagaaaagaatagaggacagcattattgtgagtcttaaagccaaagaaatttatggtcacgatacctaagtaaggaaaatgctaaccctgctcagctagtgctggctactcacacatttcaaaaggcactacaacataaaatgtattaaacttgcaggcaaattcttctgggggctgtggaagaatttaaataatatccactaaatgttatacaggaaaagggttatgtgaaaaaccaggtttcaacactgatgagaatggcttgttttaaaagaaaatgaatctatatagcacaaatggcctccaaagtcccttactttaaatcattcaaagatcctgcaaccttgctactgtgcatcagtactaatggtgactataagtgcaaaccactaatggtgtagagaaccccaaatccgtaggaacttaaagagaaaaacctgagccatatgcaagtccactgtaagtggaacagaaaagcatggatgacttcagaactattctgggattggttttacaactgcttcatccaagaagttgaatgctatctccaaggcaaaaactttgccttcaaagtttaattaattttaaataatgctccagttcattgccataaagaacttgaaaattcccactgcaacctagacattctttttatggccacaaacacatgtgtcatacaacccttcaatcagagcatacttaaaagctttcagggtgcacaacatgaatgacctttatagcaaggcttgtgaggctctcaacaccaacaaggaaaccaccgttttggactactggaagccagtcactgtatgcaatgttatttaggcatcaaagtcagtgatgataaagatggtgacgaaggtcagcctaagattccaagaactgttctcacagcagcaaaaatatcaaactgaaatcctgccctggaaacattttcaattacatggaagaatgtgaccctatgctcgaatgtagcctcaaatttaagcccctaacctccaatgcactcctttatgctgggacactgaggtggagccgggcacagtggctcacgcctgtaatcccaacactttggaggccgaggaaggaggatcacttgagtccaggagtttgagaccacctgagcaatatagtgagacccccatctctacaaaaaacaaattagctgggcattatggcacatacctgtgatcccagctacttgggaggctcaggtgggaggattgcttcagcccaggaggcaaggctgcagtcagccgtgatcactccactgcgctctagcctgggcaacagagtgaaaccctgtctcaaaaaagataaaaacactttaggcgaaaagccagacaaggctgatgcaatttttcatgccagctcaggagggaaaactgctgatgatgtcaacaagtggcaaaagtcaaactcctgaagtaaaactgccagatgttgatatggcaccctcagtaatgccttcctcttctgaaaagtaagttgcatcaacctcttccttagttttttgggggtaagttaaagtcaagcagtttaaccatacagtgcgctgtcccatcacacatcttgcagctccatcaaaagtacaattttaatctttttttaatctttaatgtttttcccccaggactatctttattggcacgactgtactgtatagtataggtgttcacagtaccatttactgttatgaatactgtacagtttgctgtgtttattgtacatgaatactgtatatgtgtactgtgtgtacataattaagagttaaagcagtacaataatatactgagtacattacacaaacatgctataattaaaatatttttattataaagaataattataattattcaagaaacactgataaagtgtctttaaacaaacaaacaaacaaatacccatagaagaaggttatgtgttgactggttgataaaaatgtttggatcagaggctcacagaagctaacgctgtatttcccctagcaacaatcattcagcattcactaattcagtgtgcacagaaaattcacagaacctaactaccacgagtaacaattcactgcatataaatgtacatgtgtacatgtgcacatgtgttaagtatttcatgactcaagcctttatatttctcacaaagacacactccctcaagggtagagatgacagttttggaacaatgaatacttttactaaatgttggcagagctgccctcaatggtccaactctcctggctctggacttagagatatatatatgtaaaacacacaaaggggatgagactttttcaatgtcttattccctgctccatcccccaacccgccaaatgacaaactgtcataaacagggaaactgaaaacaagttatgcacatctttttcttttatcttctagattgtttcctccatctctcattattttaaaatatgcttgagatggatttatagtattaataagaggaaagttgttcctgacattttacctaaatgcatgttaaccaccaggtctctcccctcgattattctcaggtacagtgtaaggctctaaactgggtgaatctttaatataattctttggatgacaagtgattacctgccataaaaagatttcacagggacaattctgtttctagttagtataaattatcagatactaagacatctctctggccaaaatatttccctcaatagttatactcaaaaggaaaggtatgtcaccactatgagttcactaaagacaaacacacttgtaataggccttcctgtatcttttaaactctggtatgaatctttcgatggtgagtgaacgatgaactgtggctgaaggtctttccacattcattgcattcaaagggtttctctccagtgtgagttctcatgtgctgagttaaagcaaagttgtcacagaaggctttctcacattctttgcattcaaaaggtttttctccagtgtggatcctattatgccgaacaaaatttgcaggttgggtaaaagcctttccacattctctacaaacatagggcttctctccagtgtgaatcctcatgtgtcgagtgaaggaagagctatagtaaaaggcttttgcacattctttgcactccaagggtttttgtccactgtgggtcctattatgtcgaataaaaacagagtggtgtgtaaaagcctttccacattcactgcactcataaggcttctcaccagtgtgaatcctcatatgttgaattaaggaagagctgtcacaaaaggccttcccacattctttgcactcaaagggcttctctccggtatgggtcctcttatgtcggatgaaagtggagcgatgagtaaaggcctttccacattcaccgcactcatagggtttctctccagtgtgaatcctcatgtgctgagtgaaggatgagttgaggcaaaaggtttttccacattctttacataaaaatggtttttctcctgtgtgggtcacattgtgctggataaatgtggagcggtgcgtgaaggcctttccacattcaccgcactcatagagtttctttccagtatgaatcctcatatgttgagcaaatgaggagctgtagtaaaaagctttcccacattctttgcataaaaagggtttttctcgagtgtgagtcatattatgctggataaaagaagagcggtgggtgaatgctttgccacattctttgcactcatagggcttatctccggtgtgaatacgctggtgctccgtgaggtgaaacctgcgtttgaaggctttcccacactcaatacacttgtatggtttttccccagtatgaagcctcatatgtcgaatgacatcagccatataacgacaggctttcccacactcattgcactcatagggcttcactccagcatgaatctgttgatgccgaacaagggcccacttcttgctaaaccctttcccacattccgtgcatgtgtaagggttattccttgcatcagtcatggggtcttttcctggtccttgagagtcacactcatggagagcatcttgtggagtgactcgttcctgtaaaacccttaagcccagactatcatctggctccaaatcatcatgtttataactcaacttctcagggcatatctctttgtgggggtttgttcctggcctcaagttcccttcctgaatttttattagcttttcctcatctctagcttgccccaacctggaatctcttgaggatctctgtgccagaagttcctggaaagaggattcctcagagaaggccagctgagaagcagtaggctctgtaatcttgggttttgctttttcacctgaaggaaatccaatataaaaaaaactgaacattagtgatgtcaacagaacaaacaaaatcaccactttagcagaagaatgaaggtgaaaacagtgtctctgatgcctactgcatttttacatctctcaaaaccaggcttgcaatttctttcctaatgcttggactcttgagatctttaaaaggaaacccagaaggaaaagcaagggcagggggcaaagaatctggaatggagaccgctcctcactctcccaaatgagggagagtgggcagactaataattacaatgtgtgtgatgaatgtgctctgacagaggcagtctcatggtgctatgacaatgtagggaggatacacttaacatggcccagatgagagacagagagggatcagaggatgtcttggatcacagcaccaagaaaaggtgagctacgtgggctttctttaaaaaggagagtaggagttcccagacagaggaattaggagggaaacttcggcagatgaaaacagaatgtacaagggctgaaagtcttgagagaatgctgattgctgagtaatgtaaatgggatgacatgatggagatgaggatggaaaggcaggcagagacagagaagaaacagactctcaggattctcacctgtgtaaaagtgagaagggtgagaaccagctagatgaacataatgagtctgcaatgtctgaataaagactaagtgaacatacacaaaataggtaagatctacatgaagaaaattgtaaaacttaagacactaaagatctatatgaaaagagattaatcaatataaagttatcagttctccctaaattcacttctaaattcaatacaacatcagataaaatctcaatagggtttttcacagatattgacaagctgactgtggatagagatcagtcagctgatatagagaccaggataactctgaagaataaagcaggggccttaccctatgaggacttagtattatgatgaaactatatgcattcaggcagtgtgattaggcatagatataagacaaacggtgaaagggaaaaatgaaatagagaactcagaaatgtatatatgtaactttgatatatgatagaagcagcagagaaggccattgggaaaaggaggaaccattcaataaatggatctagaaaaattatttgccacatggagaaaaatgaaataatattcctacctcataccacatacagaattacctccagagtgattaagactcaactgtcagaagctaaacattaaacatattttgtatataataaaaatgagtatcttttgagaaagatttccagaacaagatataaaagcattaatcataaatgaaaagagtagtcaatttgactagagtaaatataataaacaaaaaagcaaacaaataaaaaacataacattagtatcagatagcaaactatagacctaagcaaatgagacaaagagggacttcacaagatgaagagaagaccatggcgccaggaagacaaaatcgtcttaaatctgtatgtgccaaacaccagagcctcaaaatacatgaaccaaaaactgagttgaaaggagaaataaactcagaattatggttgggaacttcactctaccccaaaatgaacatattatgcactgatatttcacagaagacatacattgcccagtcaacataagaagtgttcacctttcttggtaataggggaaaaacaaattaggaccacaatgagatgccccattttatactcgctaggttgaaaaaactaaaggaccggacaacatcaactattgaagaggaagttgttctatgaaatcattcagataaggcaagggaagtgaaatgggtataaccattttaggaaacaacagagcattatctagtaaaattctccttttgctcatcttataatccagaaatgccagtccaaggaactttactaagagaaactcctatagatgtgcctgaggacacatatatatgaattatggcagcattgtttgtgataacaaaaaacaataagcaaacattttcaagctctccctgaaaatggataaatacattgtgttatattcatgcaattgactctagcaggaaaaaaaatgagtgaactacagctatatgcatcatgaatgttagtaacttactgttgaataaagagtgaaaatgccagaagacaatataaaccacaatacactttttataatgttcaaaaaaagcaaaatacacacacacaagaatacaatgtaacaaccttttatttttttgaggtttatcagttttaaatggcattataaaaagatatgtagatatgttaaatatatttttctgactttttattgtgataaaatacaaaatttaccattatgagatgaaacaatcttaaaaagtaatgggaagacaaagataaagtaggcaaatattttacattactcaaattaccaaaacggacaaacaaaaacagaacatctgaatagcctatatttatgaaaaaaacctgaatcttcctacagaataagcaatggaataacaaatcttaaagtggccatgtatgcaagggaggcagcataggaatgggaaaggaaagaaacacatcaacagatgcaggaagcaggtcatgttcttgtacttggcgaaaggtttgtaggtgttcattacaatctttttaaaggaggatgaataaatatattaataaaatgcaatgaaagaaaataaaacaaaaaaccaggacacgcattgactaatgatgacaatgtgtcataaatcattatttataatttttctaattctgcacacctagggacaattatgaaagtcagaggggggccaggcatggtggctcatgcctgtaatcccagcactttggaaggccaagacaggcggatcactgaaggtcgggagttcaagaccagcctggccaacatggtaaacttcttgtaagaagtgaaggcactgagggaaggccatgtgagcacaaagtgagaaggcggccatctgcaagctgagaagacagcccttatcagaacccaacaatgctggtaccctgaccttagacttgcggcctctagacctgagagaaaacacatttctgctatataagccacgcagtctatagtattttattacagcagccagagcagactaacacacttttctaagattcactttcctcatctgaaaaactgggatactctcagttcctgcctacaagttgttaggagaaaaagcatacaaaatattgatttgtggctgggtgtgggggctcacacctgtaatcccagcactttgggaggctgaggcaggaagatcacttgaggccaggagttaccagcctggccaacacagcaaaaccctatctctactaaaaatacaaaaaattcagccaggtgtggtggtgcatgcctgtaattccagttactcaggaggctgaggcacgagaatcacttgaacccaggaggcagaggctgcagtgagccgagattgtgccactgcacactagcctaggcgacagagtgagatcctgtctcaaaaaaaacccaaaaaccaaacaaaagttcattcgtgtgacaaagaataaatgtttggtaaactgtagaccactgtctattatcattatagttgaatttagcaatcaggatggcaacagtgacctgggcaagaacactttaagtgctgtggtgctgagaaacaccactaccaggcatcaaagagtaaagggaaagacaccaactgctcaggcgtacatggaacaatgaagactctcatacgtggctagtggaaatgtgaaatggtgtagttactctgaaactggtggtttcgattaaagctaatcatatgcccacacttgatctggccagtccacttgtatgtatattcccaacagaaatatgggtttatatccaacaaaaaatacaatcaagaatattcataagagtagtcttcataatattccaaaaatggagaccaagtcaaatgtccatcaataggaaaatgggtatatgtagtctattcattcaatgatggtaatgaactaactccaactatatgcaaccacatgaatgaatctgagtcataaagattatcaaaagaagtcaggacagagtatgtactagggggttctatttatatgccttcaaaactaatgtatggtgatatagagtataaacactgactacttttatagaaggggatactgacaaagaatgagcacaaggagcctgttaagtgctgaaaacactgtatttcttgaactgtgagatggtttctctgacttgtacatatataaaactttatagaaatgaaactttatgatttgtacacttattatgtataaattgcacctcagtacaaaaataagggaaaaaataaataaaggaaagtcttgtgtagatgtctcttcaaagaatgagaagacttctccaacaagcttggctgttcaggtgaaatagagtcaacaatatgtagatgctgctggagacgtaagagcactaaaaaaaaaaaagtctcccccaggtatcagaaacatcatcatttttttttaatgttgagtagagaggggatgaaaatatagaagaggtaggaagtaagtgaagaagcatgttccctgatgcagctgagagattcacgtatggcttctcatgatccccaagtcatagtgttcacacccttttgtagttcccctgttaaaatgttggcaggacctcgatttgcttctaaagtatagaatatggcaaagatgatggaatgtacatgataaaatatatgtaattttataagactggaacatccgtcttgctggagtctcacacagtggcttgatttgaagaagtgagctgatggtgatgatgagctatgagctgcctatgacacgcctgagaggacccagctaagctgtgcctggactcccaatccataggtgggagataataaataagtgatgttttcagctgcagggtttgtggtaatattgttacatattaatagtagatggctaatacacctgagaaggcagaaagtgtaatctagattctgctggagaaattagccatggccaggatgataactcttccacagaagtgagaaggaagctgcaggataagtcagatgaacatgaatcagtaagtgtcaaaaagcaagaaaatcaagtgtgtaggctttattcataaagtaggtcagatgctctgacatcagtggcaagggaggcggtgatacatggaacatgtgagtggatgcagatataacacacagggctgaccagatgcacagagcacatgggggaaaacagcgaggaatctggtagcattatgcaggcaagagatgatcacttggcctagagtactaatgctggagctgatggaaactagtgaaggtgaggattcaggagacatgagtgatgtgaaatggtcaagattcggggatggctggatattgggtatgagggagatggaggtgttgaggggttgtccacgtttgtttttagccttctccactcattgaaagaggcattagctgaaaatgggggtgatcatgaggtccttttaggcatgatgagtgtgaggtgcctctgagacattcaagtgaagatgtggaataggggagaggggtgaaggctgactgagcaggcaagaaggacactagaggggtgagatggtgaatctacagtgtcacaaatccacctgcttgatggctccagcttcctctggcagcccagatgtgggactgacaaaggcaatcatcaccttgaggtttttagaagacaggagggccagaaaacaacagggctagggagtgcttctgcgtatctgatacataaatgaaaagatgaatggatggatcaataaatgacgggctggagaaggtgaaaaatggtgggatgcagagtgtagtttgaaatagtaatctgcaggaaaagaaaggactgtcttctgaatgcagaagaatgtctgagctatcactattccttatgactaacactacattaatattacttacaagtaacttctgttgagccactccgggtcaggcagtgtgctaggcagtttcctgctatgtgatcacattcccaaacaacccagtcatgcagaaactatcatcactatctttcaaatgtaggctaagtgtatcagataagtatatgttcactatacccataggctcttctccttgggtataaaaaagctaaaccacatttcccagcctgatacaacatgtagcctaatacccagttcttgtggatgaaatgttaatggaagtgactactgcccttctctcccattcctcttggccggggcaaccttaaagctgcatattgacaacagaatgcatgtgatccataaataaatacagggtacacagctttcctgctgacccacattgggctatggcatggataaaaaaacaaaacaaaacgaaacttaatctgttgagtcacatgattttggagtttatttttcagagaaggtcattaactcagcctaacttatataccaaaggcacagtgacgtcacacaacctctccagagtcatgaggctagtgagtggcaaatcattaaagcctagaatctgtctcctacctaacatattccaacctgaataaaggcaaagagtgtgtgacagaagtgggaagacgggggaccatggggtcaagggctccatgactgctcaagaccacaaaatagctgcccatggcatttcagacacagtgatgcctgggtggtctgcaggctgccctgatacccgctgccagactctcagtcaccaacctgcgcaggtgctttgggagaggcctctcttcactgtccacagttcctgtccatgttccagtagatagatcagctctggtttgggaacaggatgccctgtgcatggagaaacaaatggagtatggtgtacagggaaagacaaaaagaaaagtctgaggtgtaaaggagtacatatatttaacatactgcaatgaaaccccagaaagggccctcccctgcctcaccaaaagtattccctaattaacctaagtcagtaggattcaaccaccctgtgcatcaaaactacctagcaacacccagttccaaaaacagaacaaattaaaccaaatctctgagcagaaggactgagtgctggtagtttttaaagctccccaggtgattttggtgcccatgatggttgaaaaacacaggactaaatcgcctgatgaatggcatctattgatagtcagttgtgtgaggcaggccagtgactgaagctgaacatggaggcctactgccccacaaggatactggccagggccctagaccaaggagagaaagcagacagagaactgggttagcatggattggcactgaccaagccaggagtcagcagcacctcagggcttctcattaggtaaagtaagaaattattttcagggtgaaactggcaggaggtggtcttcttccacatgcagccacacacattttgccaactgtgaaggctaagacagaagactctggagagaagtcaatgactgaggcaccaggacccagaagcatcaactggaaaatcttgtcctggcacgcatccagctgtcacttagcaaatgttcaccataggattacgcacacttacatgccacatgcacactcagcaaatgttctgccatatgcttggcactgagctgggtgatgagcagcattaaaggggaatcaggcctgccttcatctctgttaaggaatcaagcaccctgctcccacagggatgctgctcatgttggtccctcctcctggaatgctgttccccatacatctcctttcgacaactaatcacagttgtcataaaataacaccacgtttacttcattaatgactcatccctcgtgaggacgcaggactgggagagccctgtcgatggtaaccatttgaacaactggaataagtgagactttgggcctccattcatatctactcagaccaacttctgggcaaactgtccattaaaggtttaggtgggagagcatttggtatttattaatttgttaaatgtaacaaacacatgcagaacacttgctatgtttccagctctattctaagcactttacacatattagttaccttgctgtgacaggttactataaaaatggcaaaatcaaaatgataacaggtcccagcaagttcctgctgcctgcttgaggctaggagtttgaggctactctttctactgaggaggaaattcaccaacagctatgggagtgttaaagattcagccctaagccaacactcaacattcaagagacaggaaagagaaaagaaaaaaagaacagctttctcagatagcatacatccatgccatttgagaatgtgtctgtgctccctttccataatcataatcatctcctgtagcagcagaggagcaaggcacaggccttaggaagtaagggttaactgtgcaggtgctaggagccaaagagacctttcagctgagactgtgttgctgaaaaagatataagcagcactgataacaaacaccttcttagtgtctgtgtcaatcacccgctgcttgtagaacctcccattatccacaggtcctgctaactgggctgtgaggacatttgactcaaccaagctgggccaattacctcttgtggcagtctgggataaagatgtcagactgaggccagctgtgctagacagtgggataaaagtgttgaggaggactgtgtttcttacataacaatctttgattgagacacagggaaacccagcaagaggaggtcagaccacaacgtgctgaggctgcagggatcagggaaggttgggttctgaggctcctggaccagccatgcctagaaagggtggattcaaagaggctgtgggtcccctacatgggagggtaatgaggtcttacccagtgagaccaggagcctgcaggtctccagcatcacctcctggtacagggtcctctgggccaggtccaggtgcccccattcctctccagtgaaggtcacaaccacgtcttcaaatgatactaatgcctgggaagtcaaacagaggtgacaggtggctgtggagctattaggtgaaattacagctcacttcttggttactggcaaagggtccagagaccctgaaccactgagcaactcctgagaaccactgggctctgtggaggcagatggtgccgctgacagaatacaaagatgtgggacagaaaagcctcctatgttggaaaccattggaaaatgatacaagacaatgataatcccatctgactgtgaggagcagacagtaatgtcctaggacattacaagaatggggaaaaataataattcaaacaataatcacagcagcagcagctgagcctcactggtctgcactgtttgcctgcacctgagggcttcacatgctgtgttcaagcaactaaaagtctccaggtctggaatcaggctcctgaagtttaaatccagcctcttgaaccaacctgccagatgtgtgaccttggagaagtctcttaatttcttggagctccaatttccacatcaatacattaatagttcccacttcaccgaactgttgtgaaaattaatgagaaaatgttcataaagcaaacactgcagtgcccagcatgtgttacaatgtgtgtaaatttcaatagtcatcctatagcccatgatgtaaatgtcatcatctccatttcacaatcagcaaattgaggctcagagtcaagtcactcagagttgtatgtctaatgagcagaagcaggatttgaacccacatccctcgggtccaggatctatgggtgtaacccctgtactcctccatcaccacagtgaatccacagtgacaagggctaaaaatacttcctacaatttttacagttaaaacaatttcagccactcctgaaaatattgccagaggtatggaaggaagagcagagccttcctttgcctcatagaagaggcacctgaagaggtgccaactgcctagggcttgggagagctcaaacaaagtttccctgccctcaggcagctgggacttgtagactccctggaatatcccacaatgagcgccaacctgttctttttcttcctgagccacggttagcacatttcccttaggtacaggtaacacaagtggccaagggcaatgcaggctgtggctctaagaacctggcagctgccttaagcaccacgtctgtcctgggtgagaatgggatgttggcatgatgatcatcagatgatcacacaagacacgtcagcaggtgacaagccttggtgtcactctatgtctcctcatgcctctgcctttgtccatgcagttccctttgccgggaaggttccccaaagaccccttcattccaatgtccacctgctagagagaggcctgcaccttccccttgcaaagtgtacttcagctgtcgcccccagggatctccaatccactgtgggtgaaatattggttaaaaatgtaagcttctggctgggcacgtcggctcatgccagtaagtactttgagaggccaaagtgggaagactgtttgagttcaggagttcgaggccagcctgggcaacacagtgagcccatctctacaaaaaataaaaaaaattagctgggtgtggtggcacacaccgataatcctagctactcaggaggctcagtggggaggattgctagtgagctgcgatggggccactgcactccagtgtgagcaacagagctagaccctctttcaaaaaaaataaataaataaaaaatgtaggcttttatgctcgacatactggattgtttctgttacttatgagctatgcaaccttgggtagttaatctgagtctccggttcctcttctgtaaagaaaggaaaatgaaagaattttactctgagaagaagggcgttaaataaggtaatacacagaaactgcctctcagcacattatcaatgcgctcagtgaagaccagctactatttgttgctgttagtatttttcctatttgctcctgtcgcaccctaggagagctcaatgcagcacacatccaggagcagccttgcagagatctggcgacaatgtgacagagaaaatcgtccaatgagcttggcatgtgcaggagagaagaatggcagggggagtgtcctggtggattgggcagtgactttgcagccatggtggggtatggggtggggttgggttagatgaaatctaagtaggatgggagccccagaggatagaatctcattcattaatcacttatcgactaagtggtacaggcccagaacagaatagttttgggcctggggatgaaaaacagaacagaagctgacattctggggttgggggacagatcctcagcaataaacaatcaagataaagtcagaagactctagaaaacaacacaagagtgagaagaccacaaagactgggagagactttacatgatgcaaccagggaagctctctctgaagagaccctggaacaaggttagattgaagttagagaacagaccaggtgaggaaaaatgaatagacaactcctgaaggtgatcagagctacgaggagtaaacagtgtgacatgctggagagtaacttggggccttatgtgctcacactccaagagacatacattcatgtacactgtcattaatgaatattgtgctggatttgcttttcaaatacaagagcatgtgttaaacagaagcacggattcactgctgttaggcggcaagccagattcatttgtaataaacagacggcatctgcaaagataaatccaatgagcttcttgtcttctagcctcctgccaaaaatgctgctcccgcctcacctcttgccctcgaggctctcattccctctcccagcttttggtagggccagacttccgctggaatgatcccctaaaacaacagcaggacctagagagtccttcttcaaagacggcacctagagtgatgctctccgagcagtgaaagacaggacccacgtcacaagcgtaccctctccagctccctccacagagaaaattactgagactcgcattttagacccgagggaatggaggccgagggcagcgaggcgacagctccaggttagagccagagacagggacctctccttacaactcctgtcctggattcaggaccctgggtaggaagtgattagccctgccctctcacctcaccctctcccgggatctccataacctagggcatcaaaagggagaagcacagagtcccggcatccgccgtattacagcggatgggtgcatgcgggcggtgacccgagctcgcgcgggctgcggaaccctccactcaccaacgccggcgccgccatgggcccagggggctgggtgaggccgtgagagtcggcgaggaagccggtcctgcgggctcggccgaccccgggctccggctctgggctgcgagggacctcagtccccgccgtcgtgtaaaatgcacacaaggttcgcggcgccgcctctgcgcgccgtgaggacacagggctgtcgccaaggccccaggaagggttttgcagacgcttgtgggggtgggatcgcggctgacataaaagcgtgtaagtgggtcctatcctcctcactgtccgtctctactcggtctcgaaaagtggcccctgtctggcgttctacccagtgtagcgttggcaaccacagcagccgcaacctaacggcggacgaagactggacgccggaagtcccgcccacgccgctacgggaacgcccctctgcgccttccgtctatggcttggggtcggcttccgtcccttgtagcactgccttctgggtaatgtagtttgacggaatccgggtggtacctggagcgcactttctgttctcggtgaggcggcttctcaaggctcccaagaaagggattggcttcacctcttcttaaaggagaggcacacagagttccgtggaaattatctgaggcaatgacccactctcaaatgtctctaccaggcaactcacgccttgactttcctccctgtgtatccctgcgccagcagttcatctctctgagccttgagatggagattcctaaggaaaatgaagataattatttaatatgataatattaaaatttcccctatcagtaattttcagatgacatcagcattacctgcgaatttgttaccaatgcaagttcttagtccccacccactgaatcaggtactctggggggtgggacccagccctctgcttaacttgtccaggaaaagtggatgctgcaaaacatttgagaaccagactctttaaattccagtaaataaatgagacaaagccacctgtttggtgggaagtaactaagaattgcttagcactgggcctggaacataccgataagaacataagagctattgctgtcattattaatattctgtattattggcaacatcatcacaatacactgctaggggagggtctgagatacttctttgcagactctgatatttgtcaaaacaaatacgttgactgattcaacaggagcctcatgaatactgtttaaattttacataataatacgttgcagcatttggcgtatgcatctttttaaaacggtatatgcaggagggtttcctaatatacaggtagacctattgcccaagggatactttcttacatgattcaaaacttaggatcactgagactaattacctgcagccctaagggaagagtggagttgacatggtttctagtttgtgatgtaagatggcgtgtcactgttcatctctaattcacagcaaccaggatctgacccctccccatctgcccctccagcccccagggaagccagaaccaggcacaaaccagatggcccagcttatgcccagcaactcagggtcaccagatcttgtctcatcaagacactttcagcccaccacccaaacctgtagcccacatgaagagggcaataatcctggacactgtgaaaagtaaaagcattacatccaaagaggcatccccaggatggagcagaaataagaaaacataatgaagacacaattttgcaatcacttctgcctatattccatggcctacaaaccactcaaatagctccacatgtaagagaagccaggatgtgctgtcctccagagcatccagaaagagataatgggactgataagtccttggccattttctagtaaaatctattaatttagtcatcagatttccattctattatttatcctatacattctacactctcacatgcttcttaatgcgagaagccaaaatctgcatgcagtctctgacctcatctgaatgttaagatctcagggtgatatgttatgcatctagtccagattttgggtggggatgcagccaaaccatataatattatggggcctgttgggaggtgactggatcgtgagggtagatttctcatgaatgatttgatgccatccccttggtgctattcttgagataatgagttttctcaagatctgactgtttaaaagtgtgtggcatcttcccctcactctctcttgctcctgctctcaccatgtgctacactggctccccctttgccttgcaccatgattggaagcttcctgaggcctcaccagaaattgagcagatgctagtgctatgcttcctgtacagcctgcagaactgtgagccaagtaaacctcttttctttgtaaattacccagtctggggtattccttcgtaaattacccagtctcaggttttcctttacagcaaagcaagaacaacctaacacatttaccaacttatgaatggataaacaaaatgtgatatatccttataacagattattcagccataagaaaagactgcagtgctgatatacaatacagcatggaggaacactgaaaacatgtaagtgaaaaaatcagctacaaaataaccacacagtatataattccatgtatatgaagtgtgcaggataggcaactctatagaggttgaaggtagattagtgattgcttagggatggtgggtagtggtgggacagccgattgatatctaagggatatggagtttctttgtgaagtgatgaaatgttttaagaataactgtgggggatagttgcacatatatttaaatatgttaaaaccactgaattatgtattttgaacgtgtgatttatatggtaagtgaattatatctcatgaaggctttttaaacaaaacaacactgctgtaacttagaccaaaccaaagtttgtgtcaaatcctgctatgtaatatttgttacattttatagtctaaaatctaagctttatttatgaggatactcacttcattgctgaggtgtgtcaacaaaacatattagtaaatttatacgaacaaaatattagacctattactgcgaaaatacaaaacttggaaataggaaaatttctttaaaaagaatcctatttagagtcaagggaagttatgaaacacatcaaggaaatgagtagttgctaaatattgagttaatatgttatacattccttctcagtgattacagaatacttatatcaaatgaaattagatgaaatatatatttgaaaggtaaacatccaaagtagaataaatttatcattttgtatcctaagtaatagaatttctttgttgcatttactttcaatcaacaaaataggtaagtgctttattgctactactttgatttatttcaaaacctctttgtacaatgtacaaaatgtaaatgtaactttaatgtaaattgtttttatataaattgtgactcaaaatatttggacagacaagttgtgtgagatgggctttaggcaatcatgcaatcctaactcatatttcatacagaattcatatattttatttacacatattcacttcacacaagactagggctaaatttaagttaatgggtttgattattattttcccacattaaataacaacactatttatatacacctcagggatattcccagaattttaaacatgggcttgcgattcttcagctcttgaatcaaacaaaaatgttctggagttttataaactaattagcaaggcagcggctgtttctattgaataattcactgctatttctgtgattctaataaatgattgcaaaaacaggaaatcacaactaaccaaattcctcacattattagtgaggaattagtggagccccaaagtggggctcagactgtgagggttcttggcttcacccagggaaggattcaagggcaagccagtggtagaagaaaacagttttattgaataggcagtgttacagctctgtgactgcctctgcagagcagggctaccccatcggcagagagtagcagctcagggcagttttgcagtcatatttatacccacttttaattacatgcagattaaggggcggtttatgcagaaatttctgtggaaggggtagtaacttttgggtcatagggtcactgccatggaaaggggtagtaacagccaggtgttgccatggcaatggtaaactgacatggcacactggtgggtgtgtcttatggaaagttgcttccacctcatccctgttttagatagtcctcaatttggtccaatgtctgaccatgcctctggagttgagtcttgcctcctatcttaaaacgataaaagcattatgaggaaattgtcaagcccaagggtgaggtgaagaattcttagatatgataccaaaagggacataaaggggacaaaacatgatcaatttttaaaatatttgctctggatatttaaatatatatttaaaatatatattatatatatccagagcaaatattttaaaaattgatcatgttttgtattatgtatatttatctatattatatattatatattaatatattatatattatatattaatatattatatattatatattaattaatatataatatatattatatataatatatattaattaatatataatatatgatatatattaattaatatataatatattatatattaattaatatataatatatgatatatattaatatattatatattaatatattatatataatctatatatctatattatatataatattatgtataaatatatatttatatatatcatatatataggatatatatactggatatgtataaaatgaaatattattcagcctttaaaaaatgaggaaatcctgccatgtgcaacaatatggatgaacccagagagcattatgctcagttaaatgagccagtcacagaagaacaaatattgtatgatcccacttatatgaggtatcaaaaaaagtcaaactcatagaggcagagagcaaaatggtgggcaccaggtctgggaggaggataagtggggagatattgaacaggtacaaagtttcagtatgcaaagtgaatatgttctagagagctgctgaacaacacagtgcctgtagttaacgatattgtatacttaaaatttgttaagagagcagatgtcaagttaagcgttcttactacagtaaaagggggggaggggagaggtaggaggaaacctttggagatgatggatgtgtttattaccttgattatagtgatggtttcacaggtatacacatatgttctaaccaaccaagttgtatacaataaatatgtgcaggtttttttatattagtgacacctcaatagagctgttaaaaaatctctgggacacagctgaaagacaatttgaagggaaatctataatattaaacacctaagagaaaaaatgaagggtctcaaatcatgggtcttagtttccacattaaataacaaacctgcaggttgtgcacatgtaccctagaacttaaagtataataaaaaatatatatatataagaaatcagaaaaagaaaagaaacaaaatgattcagaaaaaggatatactaaagatcaaaatggaaatcgatgaaataagcagaaaaaacttagagaaaatcaatgaaactagaagcttgagatcaatgaaactgataaacgtctagcaaagttttatcaagaaatagatgtctccaggtttagagacattttgttgcatgacattgccaaagtgagaatatttacaccagggaaattggcaaacactacaagtcagaattttgttgactgtacagcctgaaaaatgtaatggagaatatgttaataatgcagattaaatttaaaagtatgttgtgtctatagctttacattgtaaacagcacaaaatttgagaaaatattcttctagtatccaaaaatatttctcaacttagcaaacaagtcactaacaccattcatgaatgactgaagtactaacaaatttctttgttgtttcattgtactcttgttagtgaaaacagaaatatctacccaaccaacattcattttaaaaaggcaaaaaatatgaatggatatctcacaaaagtagatatatgggtggcaaaaaaacatacaaaataatttcccaaatcatgagtctttacagaaatgtaagatactacttggcacctcctattggaatggcaaaaattaaaaacactgacaacaccaattgttggtgaggatgtggagaaactggaactcaccaacactgctggtgagaacaaaaaatggcacaaccacttacatttttttcagtggtcttactctgtcacccaggttggagtgcaatggcacaatcctatactcaaatcctgaactcaagcaatcttcccaccacagcctcctgagtagctagctgggactacaggtatgtgccaccatgcccagcttttttttttttttttttttttttttttcattttttgaagagattgaggatctcattgtgttgtccaggctggtctcaaacttccaacctcaagcgatcctactgccttggccaccctaactgctgggattacaggtgtgagccatcatgcccagccctgacctttttccatagtcactacactcatgaaaactttcatcagagtgaactctctgatgtttactgaggctggggctttggataatttctcacatttgctgtactcataaggtttttctctggtgtgaactctttggtgttgaaagagatcagagtagtagctgtcaaatttaaccactgctccagatggaaaggcagggtctccaactcacatctcttaggagatgcactcataaggcctttctccaatgtggatttgctgatgctgagtaaatctcacttgctgttgaaagggtttaatttgctgcacagacttttctttagtgtgaactcgatgcatattgagagtggaggcctgtctaaagaattccccatattctctacacccataaggcctttccccagtgtggactctctgttgctaaacaactgtgaaattgtggctgaaggcatttccaagttgactgcattggtaatgcctttgcatgatgagaaaggctgctgcacatggtatgctcttctgtggctcccccatgctaagagtgacctgatgctggagaaagcctgctgtggctagaaagtccccatcctccctgcattcgaaaggctcttctgacgtgtggttgcttcaagtcttcacaagcaaggtcctcccctactcctttctgatggacttctctatattctctgcatctgttgctggggaaggtttacactcactcagaatcttctccacataccacatgtgtatgatgatttctgccctgggtgtgttatttggtatccagccaggtgcaaagtgtctttcaagagtagaccacatggccaggtgcagtggctcatgcctgtaatcccagcattttgggaggctaaggtgggagaattacttcaggccaggagtttgagaccagtctgggcaacatgatgagaccctgtctctacaaaaaaattaaaaaataagctgggtgtggtagtgtgcacctatagtcccagctacttgggaggctgaggtgggaggattgcttgagcccaagaggttgaggctgcagctgtaccactgcactccagccttggtgacagagtggcaccctgtgcaagaaagagaagagaagagaagaaattaaggaaggaaggaaaaaaggaaggaaggagagagacaaagagagaaagaaagaaagagacagggaggagggaggaaggaaggggaagcaaggaagggagagagagaaaggaaaggaaagaaagagagagggggagggagggaaggaaggaagggggagggaggaaggaagagagaaagcaagaaagagaaagaaggaaagaaagagaaagagaaagaaagccagaaagaaagaaaaggaaggaaggaaggggaaagaaggaagggagagaaagagaggaaagaaagagaaagaaagaaaggaaaagaaagaagaaaagtcaaagaaaagaaaagagaaagaaaaggaaggggccgggtgcggtggttcatgcctgtaatcccagcactttgggaggccgaggcaggtggatcacgaggtcaggagatcgagaccatcgtggctaacacgatgaaaccccatctctactaaaaatacaaaaaattagccgggcgcggtggcgggcacctgtagtcccagctactcaggaggctgaggcaggagaatggcgtgaacccgggaggcggagtttgcagtgagccgagatagcgccactgtactccagcctgggtgatagagcgagactctgtctcaaaaaaaaataaaaataaaaaaaagaaaaggaaggaaggagagagagaaaaggaaggaaggaaatgaaagaaaagaaataaagagaaagaaagaaagaagaaacaaagaaagagagaagaaagaacgaaagaaagaagaaaaagaaaaaataaaatcacacacatggcaggtgtaggttctgggtggaaggacctgcctgggattcctgacaggtgacactttttcaacactatgttcacagagagagcccttgcttaccttccaatctatgccaaaaaactgaaagcaatgaaatgctggtaaaattcttgttagcttgagtgggagagaacagccccatcacaaatgtctgacccaggaatgagcctgcggaattgttcgtaagacaaaggtgctgaggaagtggaaggaagcaactgctgcgcagtagtaagactctcaaagtgacagaatataggaggctttaacagtgccgtgatcttgccagagtcaagaatagcaggatgcagtgcagaaatgatagaggcagggtctccagctcacttctccataagcaccctccagcagggctttggctgctggtaaaacatgagccctaagggtgtgtccaggcccaagaaaaatgcaattgcacctgagttgctggtgttcagggactattaatggaaatgcacatctcacaacccatgaattgtaggctaatgttggagagcactccagagtgagcagtggagagggtgagacatggagaccaggatgtggggtgcagcctggggcccagtgtcagaatagaaatgacaagtggatacagtttcaagaatggggaaggagtgatatggatgaggtatggccattagctttggaacccaaacaatggtgaacagggacaggttactgatatgtgaacctagtcctgatgtcacactctcgtcttcctacttcccaaggccaaggcccctctaaccacctcttgtaatggttgtcatggtgtctgctctgttcaggcacccaggcctattccaccatctccagttgggcaactaaatggttgctaagcactaagggaagcaccttggcaggtgagtggccagcatttgttcagaggaaccactccaccacagactacaggaaagaaaatggaaaacaaaatgaaacaaaaagcctatgaggaatgtcttgcagaaacaagtcggcagtcccagccaaatagtgatcttcttagtgcctgtaattcctggcacagccaggccccaggaaatgccagccaaaaaaggggacagaatctgcacccagaattgccccggaactggacaatcatttgggaaagaaatgactgagctggatgggatctactgggctggcctcaaaacttccctgcaaggccttggggtggcagttgctggggctccttggggagggtactgctcagagaagtgcacagaggttcagcacccacagcacatgtgccaggacagcagagaagtgagaagggcccatgctccagctgtgaggacagagccgcctctggggcaaggggacaggaagaaaccagctcaggtcactagggaagatgtgaagaccttactcagcaaggctataaatgcaaagctgtccagcatcacattatggtataggcgtctctgagcctcgtcaaacagcccccacctgcctcagggaaaactcaatggccatatcctcaaaggtcacacagccctgccatgatggaggctattgactccatgactgtcttctctcctcaggacctcagtccatcttcccatacatacatcccaaacctactctcctccccaacttcccaattcagaggagatatcaggcactggtgacactggtgttcactcccagtttgtaccctgttgatcactgtgtcagcccacattgacaacaggcaggcaggcagatagacaccaaatgtactctgggcctggcatgtggggtcttttaaaatgcacctgggatttgttttaattaggtgtagtgagatgatgtacagacaactgccattgaaagaagattttcttaacttacagttcccaagatcccaagaagaggggccatgccacgccatgcagggctacacagggaaggatcagggtcagagaggaggcaggaagagcaaagagggaagcaggggcaggaggttttattgtggtttcacagaaaggaagaggcaaggcagggtaggtaaactgagcaggctaaggatcgagtaatctgaataattttagtaagctctgggttatatgggtgctccttagttgtccagtacctggccctggagtgatttagggcagggggacagtgtcctgggctgcaggaacctgataaaagcaggcaggtaggagtaggaactcagactggttggctatacatgaatgacttacccacaggcaagtgtttattttctaggaattagctggccctgggaggggtggtctcaccaggatgagcaagcccccaatatgtcaaagcatcagaaaatatagaaaatattttttaaaaaaacatccccttgtgatcaatacaaggggcccaacgccatctcccagtgtcagcaagatcgtacttaccagatacaaacaaaagggctcagtcttcttccttaacctcccagtaccatgggccagtcattaacttccttcccacaggggtagcactcttcagactgcacctgcctcgtaactctaggccccacctgtgaagccccaattgccgctgctacccaactcctggcccacaccatggccatgttcataggctttccacaattccctctgtacatggcatgcaaagagtgcttggcaaatgcaaccaggagctcatcctgcccaagaccccctgtattcatctcccagggttgctgaattgggtggtttcaaacaaaagaaattgattatctgacagtctagagctagaagtctgaaatgaagacgttggtagggccatgctgtcttcagtagttccaggggagaatcctgccttgcttcttccagcttctggtggttgctggcaatccctggcattccttggcttgtggatacacccctccggtcacatggccatcttctccctgggtgtctttatgtcatcttctctctgtgtgtgtctgtctcagggtccacatttcccctttttataagtataccagtcatattggattaagatgcaccctcgggatctcattttaacacgattacctctataaagactctatttccaaataagatcgcattttaaggtactgagtattaagacattcacatatattttggggggaatacaactcaaaatacctttgatggctcccactggcaagggcagcgcccagttccgatttgaaggcctcccaacatggtggtgatcctggcttcaacctcagtcattaaccacacacagatgtttgacacttattaatagatcctctttctcttctgtgttgtgcattctattccttcatcaccatgggtcaccacaaaagcctagtgtgtccagagactggtgaataaactccatcccagatcttactgtaattccacctccattctggctaagcctcaacatccatctcgaatcgatacccccttggaaaatgtggccacttaccagatcctgatcttccccatatgcaatcctcatggccagtgatttgccgaagcaagataaccagtcctcaggctccactctttcctttctttcaacatattggcattgcaccatgaccagaaaatctcctctcctaaatctccacacaactccatagccatccacatactagatgccacaatttggattctcataacccgaatccctccccagcacaccacaactgtatgtctagttgcctgctcagaacctctactcaggggcccctggaccgtcagactcaacatggccaaaacctaacttctgatacttctgatactgccacttaaaatctcccctacaaccaactattccatctcaattggtggcacatctgtcctttccagctgctaagccaaaaacctggggtcacctaacctccttgtccttcttacccttcatgttagaaaatctggtcagcttgacttaaaaaatagatgcagaatctaatcactgcttccatatccattttggtttagcgaacaccacttacctggactattgcagtagcctattacttggtcactctgctcccaccgtatgcctctacagcctgctctcctctctgcagccagagggaccctgttaggatctcagtaagatcacctctctgctctgttcccaaccttcagggctcccagaacattcagaagagagacccactcctcactcaggcattccagggctgccttctgccccctgctctctggtaacatcagtgactccccagtgatgatggaaaggggaaaagtctcagggaaatattatcctttgtatctcagtgccaagaacttgagagtggaggtctgagcagctgaggacctaaaggcccttccacttacctgcactggatccatcaatgccaccatatccagtgagcaacatgaacagggtgggaatgtgagaagcgggagactggggcaggtctgatgggctcaacctgctcttcaatttggtctgtgctgtggggggtgtgcccttgtcagtaaaacattggaacaatatttcccagggccaactggaatgctgtttggccattgtcatggagaaacagatacaggtcacaactatattacccagttatagttgggtgctccaacttgggtgctccaagcctcagactccaccagtataaaatacacgtaaggcccaagatatcatgggatggagtgagggtgcagtggctctggaggatcctggcagaacccccatttcaggaggatcatagctaatgcaaaggggtggaggtaggtcctaacctctgcacagtccttccctgctcagtgctgacaaagatcttctcaaccaaactctaatcaggctcctttgaactctctcctcacctaggccctgatttggatttccatgttgtctctacattgtccatttttagcaagaatcctgctaagtcagcttaccagaatccccccttacctctgacatttcctcttagtgcttttccatttattgacccctccacaccattccttgggtatgaatccccacttgttcttgctgcagttggagttgagcccaatctctctcccaccctagaacaccccgctgcagtggtccctacatctctcgcaagagtcccgctgaatcaagtctgccttactattctttaacaagcgtcatgatttttttaacacctgggaattgacttggcccctgtggagtaacccagcaccaccaactaaacattcacaatggtgtcttgcaaagcccacagcgcctatgtggggtacaggaagtgcccctttcctgggtggaggcacagagacttgtctgggtaatatagttgtgacctgtatctgtttctccatgacaatggccaaacagcattccagttggccctgggaaatattgttccaatgtcttactgacaaggcagggcttttcttcctcctaaaggagccacatctagatttctgtggccacccaagctgatgctccaccctcagaggttgctaataggagactcattccttgaccttcctgcctctgaggccctaggtgcatctcttcagttctaggcactcaataacctacattcaaaatgaaaaatgaagaaaataccatgcttttagggtctttgtgtactaacattaaagactgttctaatccagtagttcccaaacctttaacattgggaccacctgataattttttaaaaatgcatgctccctggccccaccaaaacctagtgaatcagaaactgtggggctggggcccagaggggaattttgatcctggctgcagtttgagaaagggaatgctcattaaaatccagtgaataaaataggtaaaataacaccacatacctcatgggaagtaatagagctttgcacaggacctggcacaaagtcagtactcatgaaatgcattacggctatttttatcatcatcatcatcatcatcatcatcatcatcatcatcatcatcatcacaagacactcacatacaatggctgtgagggggcaaacgaaatgtcccttttgctgggtcatttgggatatctgtcaaaatataaaacatcactcaaatgcatcaagcagcctcagagttaatcactgaaagttttacaagatagtacacctttgaataacactatttggctcctttaaaagaatttatttttaaaaatagatcatgcaggagggtttcataaactgtaggatgaattcttataggccacaggattcaacgcttgagaacatcacagctaattgccctctggccaaagtggagagtggagttgacacaatttcaagtatgtgatggcagatgacaagtcattgttaatctctaatactcagggaattcacctccctccagcctctaggtgcaaatatttgactatgaaatggcacagcctgatgtttactgacagaattatcaggtactgctctcatcaagacttcaacagcccattacttgaacctgcagtcctcaagtgaataccaaattaattaagtcttaggaaagccacatatccaggaagagaaaggggattcctaagcacctactcagtttctagcacaacccatcaatttggccaccagatacatactcattacagtcggccctctgtatccacaggttctgcatccatggattcaaccaactgtggattaaaaatacttggaaaaaatggttgcctttgtactgaataagtatacgcctttttttcttattattccctgaacaatacagcatcacaactatttacacagcacttacattgtattgggtattgtaagtaatctagagatgagttaaaatatatgggaggagtctatgtgtaggctatatgcaaattctatggcattttatattagggacttgagcatctgtggatgcagtatctgtgcaggatcctggaaccaatgtcccatggatcccaaagggcgactgtgtatgatttctcctccacactcaatactcttacttcctcttttctgtgacaatcccatccagtcactgtctccatctcagtgttagaatttcggttcatatcctaacctaagatctgaaggctatgatcaaaatggtaagatatttgtcaccactcactcccaaaatataattgtgactcagggacacagtgaaagggaccaattcaaactgctgaagaagtaactgctaaccaaaatttctacacatagcaaaagtgtttttgaagaaacagcataaagcaaaatgacttcagagcaaaaataagaaatttaatggaaaattaacctgcataaaatgaaattcttaaagaaaattctatttaaggatgacaaaaagtgataccaggtgaaagatctgtgatgagagaagaaatgtggatccagagagaaggcacatctgtggattaaaaaaatactcattatctgtagaaaacgtgacaaatattccactgtgaagttaaaaagatggaattatcatgtatagcctcgataacatatatactgagatgggataaaatgattaatattctaagactctttttaaaagtattaacagataaaattgtatatatttgccatgtgcaacatgatgttttaacatgtatagacattagaatgactaatctagctaattaatatattcctacctcacacagttatcattttgtaatgagaacactttacacccaccctcttagcattttttaagaagactatatattattaactatattcaccatgttgtataatagatttcttgacagtattcctgctaactgaaattttgtatcctttgagcaacttttccacaaagctcccatcccctagtgaccattctaccctttactcctatgacttttttagattccttatatgagatcaggtaaaatttgcttttctgtgcctggcttatttcacttaacacagtgtcctctaggctcatcaatatgtgccacattttctttacccaatcatatctcgatgaacagttaggttgttcccatagcttagctttcatgaataacattgcaatgaacatcagattgcagctatgtctaatgggttaatttaatttcctttgtgtctatgtccagaagagggactactggatcacatggtaattctatgtttacttttttgagaaacttccatactgttttccataaccgctttactaatttacattaccaccaacagtatggaagtgttccctcttatccacctcctcgccaacacgtgctcttttctctttttgataacagccattctaacagaggtgaggtgatgtctcattgtaatttttatctgcatttccctaattattagtggtgttgagcattttttcatatagttattggtcatttgtatgtcttctttagatgctaaatgtctattcaggtccttcccacatttttaattgagttatttgttttcttgctattgtttcagttcattatatattttggatattaactccttatcaaatgtatagcttgaaaatattctctctcgatctgtaggttgtctcttcactctgttgactgtttcctatgctgtgcaaaacctttttagtttgatgtggtcccatttgactatttttgcttttgttgcttgtactttgggggtcatatccaaaaagtcgtggctcagatcaaagtcatggagcatgtcctctacattttcttctagtagtttcacagttttgtgtcttatatttaagtctttagttcattttaagtttatttttgtatatgttgtgagataagggtctaagttcatccctctgcatgtgaatagccatgttttccaacaccatttattgaagagactgtccttttcccatggtgtgttttcagtgcctttgttaaaaatcaattggctctaaatgtgtggggtttatctctgagctctctattcaattaacgatagcttgtcacaaaaggctttctgacatgctttacattcaaaggactttcctccagtgtcctatgatgtacccgcactgtcatgatcattgtagcattattcacaagcatcaacctaagtgtctgtcaatggatgaatgaacacaggaagtacaaagaatgaatgaatacaggaaaaaatgaatacaaagtgaaatgaatacagaaagacaatgaaatattaatcagccttaaaaaaggggggaaattctgtcatttgaaacaacatagatgaccctggagaatattacaccaattgaaataagttaagcacagaaagacaaacactgtgtgatctcatttatatgtggaatcaagagaaattgaactcatagaagtagagagcggaaggcctggggggaggaggagaggaagattagggaaagatgttgatcaatggtgcaaaatttcagttagacaggaggaatacattttagtaatctattgcacagaactgtgactataacaaacaatgtactgtatatcttaaaattgctaaaatagtagattttaaatttactacaaaaatttatattatatatgaggtgatagatttaattagcttgatgtaatccatccacattgtaaatatgtatcaaaatattatgctgtacccccataaattcatattatttgtcaattaaaaataaaattaaaaataaagaagttggagataaaaaagaaatgtgttattattattcattgcagttaatgttattacatgcacaataccaatacaaatagctaagtcttttagagccactgtgtttcaggcattaccttatacagttccatatattatctaactataccatcagacaatccaatgagatgaaaagtattgaaaagtcttattaccaccatttactaaatgtaggctaagtgtacagaatgagatagatgttgaccaaacccattttctctcctctttgggtacacagctataccacctcctggctctgagaatccaggtgcagccaaatacccagtttttgtcaacagagtggcaacagcaatgtatgggtgcaagtgggcatgacttctctttctcatttttcctctgctgacagataatgccaagaaagctttaaattgagccacatgttgacaatagaatgtttcttattccctgaataactgtgtggtgcagagctccttgctaacctgtgtggacctgtgtggatcttgaatgaggaaaagaaaaagacaaaagccaaaaactctccttgtgctgggctgctgatattgtaaagtgtttctgtgttacaatagccagcattaacttagccagcttttacactgatgaaatcatgcaacatctcacaaggctggagagtggcaatgtcaagtattaagcccaaagacatggaacttagagtttgattttaacctaatacaacctacttctcccccagtagcagggaagtgtataagggggtaagaggatggtcaaaggactgtatggatcccaagtccccagggaggtcacaacaagaggcttcccccttcccaaaaagaggtccccaattgatctacggagttcagggactcccacctgcccagctcttggtcacctacctggacaggaactttatgagaggcctctcttcaccacacaataatcttgctcattttccatcaggtagctcagttccaattttggaagaagataccctgatcatggagaaataggacagcaatatttgggtaaagataagaatgacgctctgtattcagtatggtgttcaagacaagaggaggagcccagaatgaggctgctcccttccatgcaaagaaaatgttgacctgtaacctggaaaccaacagcacaaaaactatccttgagccaagagtctatagagggttgtgatgaccatcaatgtaacattcatccccctcaatctccatcctacagaatccaacactgttcatgggcaagcccttccccctttaaatacagccatgggaccctgggaaagtgacatttcataacagaaactattttctaattaacttaagtcagtgggtctcaacctccctgaacaaaagaaccacctggggatgccttgattatgggccaaatggaacaaaatcccgggatgaagcatggacatgagcagctttaaaagttctccaggtgctcagggaggattgaaaagtgtgggtctaaattgactgatgcctgactttctgctctgtttctatgtttttggaaaatgttgggagttctgctattttggagctatgatttttgagggtgcaagtgaggtaaagggaatctgtataaaccaaggaaca[139 bp omitted]cggtgaaaacccgtctctactaaaaatacaaaaaattagctgggcgtggtggcgggtgcctgtagtcccagctactcgggaggctgaggcaggagaatggcatgaacccaggagacggagcttaccgtgagcggagatcgcaccactgcactccagcctggatgacagagcaagactctgtctcaaaaaaaaaaaaagatattaatcctcgtgctatgaatctcacaaacaggataccaagcgaaagaccctggacaaaaagccatgcatgccatgtgaatccatacacataaccttcaagaagaagccaatccaatgtatggggatggaagtcagcacagtgacgccttttgggggaactgactgggagatgcagggggagcctgctggggattcagaatgcctgatagctcgatctagtggaagttactgtaagtggggacacagattaaatatgaattgaaatgaacacttaggactgaacattttgctgaggtatgccttatggtatacctcaaattaacaagcatattaaaacaataagtcatgctcaaaaatgttattgttctctttgggcagcagcttcctagagggaagccaattgggtctagagtcagcagctttggggaaaagcccacacttcaccagggatgttgtgagggctaatcagtggagcagggagagtgcctggaacagggcctggcatagggtcagtggtcaggggacgttggctgtgaccattagtataaaccactattctttaagttgacacacattttgtttacttgaattggtttcttcataaagggaatcttgtattgcttataaatgggaaaactagtttcacttttcacaaatcagtttccatcaaaatacaacaatgaaataaaaataatgctgtaagttctggtaagcttatgtggcccaccctgtgcttctgatgtaggtgaaccccagaattggggcttggcccaggagggttcttggttttgtgctggaaagaattcaagagcaagctgacagagcaaagtgaaagcaagtttattagagctacagagggcaggaaaatggctgctctgtagcagagtagtagcagaagccctcgtggattgctggctagctatatttatggctattcctgcattatatgctaaataagaggtgggttattcatgagttttctgaaaaaggggtggaggttccagtaactgagggttcctccctttttaaaatcgtatgtattagtcagttttcacgctgcagataaagacatctccaagactgggcaatttacaaaagaaagaggcttattggacttacagttccacatggctagggaggcctgacaatcatggcagaaggcaaggaggggaaagtcacatctcatgtggatggcagcaggcaaaatgagagcttgtgctgagaaactcccatttttaaaaccatcaggtctcgtgagacccattcactatcacaaggacagcatgggaaagacccctccccgctgccccacgattcagtcatctcttactgggtccctcccacaacatgtgggaattataggagctacacgatgagatttgggtggggacacagagacaaaccatattactgtataaggtggcttctgggagttgcatggcatttgtaaactgtcacggcactggtgggagtttcttttagtatgttaatgagttataattaatgtacaatgagcaacgagggcaacatcttggttttagctggttttggccagtttctttgctacatcctgttttgcttagatactgttttgatcagcggggccttgtgactggtgctcagaaaacaagtcccactgatcttcgacctcattcccccctcagagattatatactcctccttaatctttttttttcttttttttttttgagacagagtcttgctctgtcacccaggctggaatgcagtggtgcaatcttggctcactgcaacctccacctcccaggttgaagcaatcctcccacctcagccttccaagtagctaggattacaagcatgcatcactatgtttggctaatttttctatttttagtagagacagcgtttcaccatgttggccaggttggtctcaaattcctgaccttaagtgagccactggcctcagcctcccaaagtgctaggattacaagggtcaatcaccatgcctggccctccttcttaatcttaaggggttgtagaagggtagaggtccatcttctgcaactgcttcttgctgatcttatgggcataggtcctgcctagctttgaaggagtaaaaatctctgaatacctgatataaggggcccaaagcaggatgtctttattttctgggtcagaagatgggatgggttggaagccttgtgacatcttcacatggaatttatgtaatctagaagacacagactttactaagaggttaaacaagcaagggccaaagatcagtggtaacagagctattaaaggccatagtaagagtaaaaaccatgtcgtacttggtaggtatcctttgatggagtctcagatggtttgactggtggggttagtaaaattatgtagccaggtggcctgctagtaaatctttatttttcttttttgagacaaggtctcactctgtgacccaagctggagtgtagtggcatgatcatgctcactgctgcctcgatctctcaggctcaagcaaccctcctgcctcagccttccaagtagctgggaccacaggcgcacactaccctgcccagctatttttttaaatttatttttcatagagacacagtctcactgtattgctcaggctggtctcaaactcctaggctcaggtgatcctcctaccttggcctcccaaagtactgggattacagatgtgagccactgtgcttggccttggcagatattttgaacttgcagttcaattatccctgaattgttaacataagaacaacaggtatgacttactaccacacatactcctcattgttcagccagaagatagtctagagccaatctgctgtctaaggcaacattggctagggagtacagggaggcctggagtccacttacggcttttcctatacttcctgcctgtgtttcaagggtttgagtacttatctgtgcattttcttttctttttctttttctttttgagatggagctttgctcttgttgcccaggctggagtgcaatggcacaatctcagctcaccgcaacctctgcctcccaggttcaagcgattctcctgtctcagcctcccaagtagctgagattacaagcatgtgccaccacgcccagctaattttgtatttttagtagagatggggtttctccatgttggtcaggctggtctcgaactcccgacctcaggtgatccgcccgcctcagcctcccaaagtgctggttttacaggcgtgagccaccacacctggcaatctgtgaattttcaaaacaatagctttaagtcttctagggtttcacagtgtagctcttggtgtcctcctcttgtgcctgaggggactcataagaaacaggtttatttaatcctggacaggtatacccaactagtgattctgtgaagtttaatagcagtgggggtgttcaacaatgcctaataggagcccttcaatttttttttttttttgagatggagtctctctattgcccaagatggagtgcagaggtgcaatcttgactcactgcaacctccgcctcctgggttcaagtggtcctcctacctcagtcttccgagaagctgggattacaggcgcctgccaccatgcctggctaatttttatatttttagtagagacagggtttcaccatgttggccaggctagtctcaaactcctgatctcaagcgatctgcctgcttcagcctcccaaagtactgaaattacaggtgtgagccaccatgcccagcctttccaagtttttaagagggctaaatatcctgggtgaacaggggagccattcttttcctctgtgggaaagggcaatgctttatttccatattcttggagagctttttgaacctggcccaagttgatagtatgagtgagcattttatgtctcctcatcaaacaggaggtctgaagttaaaaagggcctcccatagttcatttcaaatgggctaagatttaagattccctttggaactatctttatgcacaaaacggctatgggtaggagaggcccccagggtctctggacaaagttttgctgacgtccttttaaaaacatggttggcatatctccaaatgctatccctcccccctccctccaccccacaacaggccccggtgtgtgatgctccccttcctgtgtccgtgtgttctcattgttcaattcccacctatgagtgagcacatgcagtgtttggttttttgtccttgcgatagtttgctgagaatgatgatttccagcttcatccatgtccctacaaaggacgtgaactcatcattttttatggctgcatagtattccatggtgtataggtgccacattttcttaatccagtctatcattgttggacatttgggttggttccaagtctttgctattgtgaatagtgccgcaataaacatacgtgtgcatgtgtctttacagcaacatgatttataatcctttgggtatatacccagtagtgggattgctgggtcaaatggtatttctatttctagatccctgaggaatcgccacactgacttccacaatggttgaactagtttacagtcccaccaacagtgtaaaagtgttcctatttctccacatcctctccagcacctgttgtttcctgactttttaatgattgccattctaactggtgtgagatggtatctcattgtggttttgatttgcatttctctgatggccagtgatgatgagcattttttcatgtgtcttttggctgcataaatgtcttcttttgagaagtgtctgggaacatctgtatgcagaagtacagtatacagagataagaatttacaatatagtgtgtgcatcagcaatttctaacagagccttaaaacagaaacacagtctatccataacctatatttagtaagatactaatcagtagtaataattgcagcaaaagctgattgcaaacaatcaatagaagcaggatgtgaaactagacaaccagttagaccacaaaatctcagaagggagtatgtcttaaccctaaagagacctagaagagtcgtggcaagataagggtgtttatagccctatcttatccgtatgaacaggcgcccccatgcatccatttataggctctccacaagggtcgcattccattcccagagctatgaacatctgcttttctgggataggaatcttggtgatgtgaaacctccctgactccacgtcggtttataggctctctgcagggggaaacacatcatgtgctgttggctcattctggcagtcccacctggcattgtctttacacaatcctgcatgcaattttgtatttacaataatcaggagcatttcatcttttattccatagcaatagtttcagggggtctccctacaattgtattagataaatgcgttacaatcaagatttaggcatcagatgtgctcattgctactggggtacaatttctttgaggccttctcagcgacagagcaaagaaatgtatgtgtatatactaaccatgcatatgccatctgtatctatattaacttaaacatgtattcttactgataattccaactctaatctggtaccacagagatcattctagcatcctccccttgctaatctataaattcctactccaacagtgaaaacctggctcccactgtccagcatccatttatttaatagttcaattccagtatacatgtatagcagtatcagaattgttcatctgtaccctcatgtgaaaactttatcaactagtgtacactgcatatttgtagttcattttgcctttagtcttacagactccattcatttctaaagttacttaggtcagcacctttccctctactccctctgtgaagttgcctcatacatttgtaatacagatagatttgcatgttacagcctaaattattttctgggatccttcaacctctgaatttattacattaatttgcatacattaaggttcactctgtgttggacaggtctatgagttttgacaaacgcaaacagtatcattgtagcctcatggccataaaaatcccttgcatttcacccattcaaccctcccccaatctcctggcaactattgatcttcttactgtatctgtagtttgtctttcccagaatgtcacataattggaatcgtactatacacagcacttttttttttgagacagggtctcattctgtcacccaggctggagttgcagtggcatgatctcagctcactgcaacctccacctcctggactcaagtgatcctctgacctcaacctccggagtagctgggaccacaggcatgcaccaccccatcctcctaatttttgtattttttgtagagacggggttttgccgtgttgcccaggctggtctggaactccatagctcaagtgatcctcttgcttcagcctcccaaagtgctgagtttactggcgtgaaccaccatgcccagcctcatactatacatagcattttcagactgacttctttcacttagcaatatgtgtgtaagaattctctgtcttttggtgtcttgatagcccatttggttttatcactgaataatattccgttgtgtggatgtacaactggtttttgtttcctttttatccattcacatacagaatgacattttggttgctttcagtttggggaaattatgaaaaaaatttgcaatagtcatccatatgaaagtttttgtgtgaacttaagttcaaaatatgaagccctaaccccagtgtgactatatttggagaaagggcctttaaggacctaattaatgttaaattaaataataagtgtggtgctctaacctgctaggactcatgtccatataagaaaaggaagagacaccagagattgaggcctccccttttcctttctcttccctgtctaccccacagaaccatgtgaagtcacggcaagaaggcaactatatctgcaagccagaaaaagaggatagagggccaagagaacagagctgctgttatctactgaactgggggagacacaattcagttggtaacaatggctacaccactttgcattcccagcatcctttatagagttcttccactctacatacttgtcagcatttggtattgtcagtttttaagattttagccactttaatagatgtgtaggctaatgtcttgttaatgtcttcattatattcccgaatgacatatgatgtgcatctttacatatttatttgccctgtgtatgtcttctctggtaaggtatttgttcaggtcttttgaccatttttcagttgggtcgttttgttttctcactgttgagttttaagttgttcacctcacatattttgatgctttgttatgtacatacacattaaggattattatatcttcttggagaattgacctctttatcattatgtactgcccctctttacccctgaaagtttccttgctctgaagtctgatattaatatagttactcctgctttattttgatgaatgttcacatggcatatctttctccaccccttaacttttaacctaccagtatctttatatttaaagtgaatttcttgaagattgttgggtcttattttttattcaatctgacagttcagatctttaatttgtattaagtttctactgacatatcttcaagctcattgattcttttttccactatgtccagtctactgatgagcccttcgaaggcattcatttgtgttaacaatgttttttatttctagcatttcctttgtttttttttttttttttttctttttttgagacggagtgtcgctctgtcacccaggctgcagtgcagtggcatgatctcggctcactgcaacctctgccccccgggtccaagcaattctcctgcctcagcctccagagtagctgggattacaggcgtgcaccactacgccctactaattttgtgcttttagtagagacggggtttcaccat[133 bp omitted]tctacttatattacccatctgttcttaaatgttgtttacgtttttccaatagagcccttgctgtatattcatcagttattttgacccaatgtgtttttactacttttatcagtccttccacctctgtgtggtaaacatgagcaccttctccatatcacagtcagtgatctgaggaagttgtccagagtatctcagtctagtgagcaggggcaggatttgaatgcaggtctctctggtccatggtttatgtggataaacctcatactcttccactatcacagtaacaaggatgtgaagcatttctaatatctgttgctcctaaattcatttaatccatccctgaagatatttctgtgtacatggacagagaattttccatttttgctgcattaataagacctttctccagcgtgaattctttgttgttcagtaaaactggaactttggctaaagaatttcccatgttccctgcactaataaggtctttctccagtgtgaattcactggtgaggaacaagtccatatttgcagctgaaggttttcccacattcacagaactcataagccctttccccaatttggactctttggtgtttgacaagtaagggtttgtatttgatagctttcacatatgtgatacactcataaagcccttctccactgtggactctttggtgctgaacaagtgtgtgtttgcagtttatggctttcctgagttcactgcacttctcatcactttttcactgtaaatggctgccccacactcagtggtgctgtatggcttttcctgttgtaagtggcctggtgctggagaagtcctgagtcaaccaggaagtaccttccaaccttctcaaaggtaaaggacttatttggcacaagaaatctgcagcccttcacgaaaaagctcctatctacatcccttctgaagggtttctctttactgaaaggatcattttccacatgcccctaagtatacagtttcttcctgggatattttcccctgtcctcagcaaaaggcaaaatgtctttcaagattaagacatacatatcacaggggtgggctttctgaggaaagggcctcagggggctctgacctgtgacaattcttttacagaaaatcttggctgagaagatgcttcctcatctttcacttcatgccaataccctaaaagcaaagacatgccagtgaagtgcacgtggactttggtgagaaggggcactgacatcacaaatgtgtatctgcacaccaatgcatgagtctatgtgagttcacaggactgttttcaggaggagagagtttgggtcagactgaggaagcagctgttgtgaactcatagttttcaaaaagtcacagcatgggagaagcctcaccaggcaaaggacacaaggatgaggtgcagcacaatgaggaggagtggggtctacaactccctcctctgccaatggtttttggtacttgtatttgctgatgacacaagaggtgtgcagaaaggtatgtccaggcccaagaaaatccaatggcaaaagagtggctcacgttcagagactacttaagaatatgtgtgcatctcacaacacagtatgtgtgggccagtgttggagaacactgtgagagggagtagtggacaggagtaggtaagatgtgcaatacagagagttggggattagccctgggacaaaagtctgactagaaatggcaagctgctagtgtcaagaatgggagaagaaaggtagaaatgaggtgtgaccactggcattggcaccaaaatagtagtgggaacaggactggttcatggtatgatttgaacacagccctgatgtcatgccctctcacctgccacttaatagggccaggacccctctgagccgcatgtccccactaagaagcacccatagctcttccccctgctcccagctgagaatagtacctggataatgcaagaactaaaggaaaaactgaagaagggaggagccagcactggcccagggaaacttggagcaacagactacaggtaagaaaaccaaatgttacaaaaacaacctcagaggaggacataaatagtgaccatgtcggtaacagcaattcctggtataggaagacatggggatatattagctagaggaagggggcagaacctggggcggagaggtcacctggccagggaaagggaaaagtgggcttataaaggctgacggcaagactcctgatccccttcccagtaagcctttggggcagcaggtattgaggctgcttgggaagaggataggacagtgcaatggctcagccccaccaaccagtgaacctacccaggaaactgaggaaggaagtagagtccattgtcctaatgtgagaaggatggatctgtccttggggaaaaggaaaggcagaatctagtctaaagtatctgggtgggtgtgagggtctcacccattgaggccatcagtgaaaagttctcagcatcacactgcagtataggagtttcggaacatcatcaaggagactccattccctccaggagaagtgcatggccacttcctcaaaggtcacattactctgttatgatagggacagatgaaaccatgaagagcctctcttgaggacccccagtacatctttctataaatccaccccatattcatactccttccaagatccaaaacccagaggatgtatcagaccttggtgtcatttgtgcctactccctcctatcacccattaatcgctgtgtctgtgctcaacaataagaagcaggtgggcagacagacaccatttaagttccaggcctgccacgcagggccccaccccttcttgccaagaaattaccaggaagtccctagatggtaccttccaaacacaaccaaacttgggctcactcttcatccttaagtcccaaataccagagccctaggacacactccctctccatgtgcacatcattctttaggctattcctctctcatatctccagatgtcatagatattgctatcttcctatcccaaactatagatccctccctagcctccccacatgctactcaccacatggcatcaagaacatgcctgacaattcagacagaatctagtacttccccaagacctccaatggctttcactgccaagggcaacccttaatcctgctaagaaagcctcaccttctggctgtttcatcagtcaatctcagccatccagaacaacatgcaggttttagatacctccccgcaaactgctgccctcctaatgcctctagcagacaaccacatttgcccctgtgctaatccactatcctggcgagtccgtagagctgtgaagtaaaggccctgtccttggtgccatctttcttcaattactcctatgcttctgtatccacatgaatgtctattcttctcttagaagccctggcctcctgccagaccctcttttccccagacccaaccttcaggctcagttctctcccttcagctgtgcctgtgatgcccaccacacccaaccaggtgcccaagcaatagatccagtcctcggccctcactctccccttcttggccagctgaaagctgaagatcatgacctgaagatttcttcttctaaatgtgatgcacagcttcacctcaagtctacaaagtggccaccaccttctggatgtctctattctgaatgactccctagagttccagacctttgtgtctaccagtccacttgatgtcttcactcagtgttctctgaaatatctcactcttcacatggccaaaacaaaactcccatatacccactgaaaattacttttactactaacttctccttcatttctgtggagtcttaattaggcaaaaggaatcaggctggcaggacgaggagaaaccgaaaagaaaaagcagataagctccaagtctgcctttcttcatggtccaggacacacagccctcctgcacaaataactcacaatcttcctgtgcccacctatcaccagacacctgcatgctagctcactgcaaccatagtgttatcggtattgcacaaaaccctcttcagcacacagcataaacactatcctataaaatctcaagcaagcctttgtttcttggcagtcagcttctcttctgctgatcctgcctatgggcaacatatcttcctactttctctaataaatctgcctttatttacctacaattgtcttggtaagtacttttactgccacaccactggcccagacagtcactgctcacctatgacacttccttccaaaactttggagtaatccctaagtgctacctttttttttttttttttttgagacggagtctcactctgttgccaggctggagtgcagtggcacaatctcagcctgctgcaacctctgcctcccaggttcaagcaattctcctgcctcagcctcccgagtagctgggactacaggcacgtgccaccacgcccagctaatttttgtatgtttagtagagacgaagtttcaccatgttggccaggatggtctcaatctcttgacctcgtgatccacccgcctcggcctcccaaagttctaggactacaggcatgagccaccgtgcccagctgctacctttttttctctcaccctcaacattagaaaatccagcattcagccctatttttaaaaaaggtctggaatccagccactttctccatttccagataccaccaacacttacttagattattgcagtagccccatccatgatcttcctgcctcctccctcactctcaaaatttgttcagtctgcagccagagggagcctattaagacctgagtcatgtcacctcattgctcctatgccattgctcccatcaactccagaaaccacccaacttctcagactgccattccagatctgacccctactctcctgctagcaagaaagagaggagatctgtgattctctgaacactcccttctaagccttaccttcaagcatttggagatggtggtacctgtgcttaggataaccttccacacctcatcctattggttgctagatatacataggaactattatatatactacctctggccgaggaccctgggcttggggtttctcaagcaaccccagtctcaagggctagaagagtcacacacaggctgagtcccaaggcaccacaatcctatagccacgtggatggaaggttgggaccagtgagggctcactcacctgtgtatgatccataagcacttttgtggccacaggaacctgtgggaagaggtagaccttgagaagcaggcaactatgggaggactccatgggcttaggcctctcttgaacatctgcccagtggtggaaacaggtgaccttggactgactgtacaatctctatatttcagtcctcaataatgccttttacctgctttgtaactttgaacaagtactcaatctccctgtacctcactgtccaacttgcacctcatccagtcttcttcctccaagcagcttttgggaaactttaaaaccttaactcagactgtgttcctcctcagttcacaaccctgcatggctccaagcaccatcagaaagtgaaaccgtgccccaggggtagagaatttgttaactagcaaaatttcctgaacttgttttgcagaacagtagaaaagtaaatagtttcccacagtcccctctgtttgcaacaaagttggctgatgagctgagactgcttgggaccaatatggctgactggagtctgcacagaatagacttatcagatgagtgaccttttgatgttagagggctgaaaacacctccagatcatgctaacaccatttcctgaacatatgacccataaagcagcatgtaggggcaacagtccttgcccaagggactctccaaaccgctttgtcttccagccaatcactgtccagcccaaaaccccaccctcaaaatctctccctcaaatctatggcggccaagctggtacaaggagacagactggcctcctgcctccttgactcttagtaaacctttattgctgcaaaaacccaatgctttggtgtttgggtttctggtgtttgactttcctttgtatatgggcaaatgggcccagtttggttctgtgacaaatgaaggtacaacaccttgtcactgcaggtgtgacttctcttcacactctactctgtgtacacacagcccccaggccagcccagttgtgcctccaaacctttgcacatgctgatccctcagtctgtaacaatcttctgtgactcaccacactggctttcagaaacggcttcatcacccatgagctctcccgcttcccccagcctaaacaccagggcctagactgaagtgacctgaacaggttcccacaatgtggggcttaagatttgaaagtaggagtccggcgggtgagggcccaagggacgcaccaccaacttgaagccaccgtgatgcgagcctgtgggtgaatggctccagaaactgcggtgactaggatggggacagccacatggcagcctccagcccagcactgacacgagatcacaatgggtggcaccctagcctagcgtcagagcctcagtcttacctctgtgcagtagggacaaggcttcctgttgccttcgcctccttttccctcagacctgacccagccctctgtagtttctgaacaggtaaaacagctgcaaggcagccaaaatgaccgccacaaagtgagacaggaagtcctgaccatcttcacccctaaacctggaatctcccatctttctgtgctttcattggataagcactgctgccactcagcagagaattctgggtaagggtcacatagctctcacacctccacacagtgaagagctttcccttgcagccacgctgtcttgaataaccctcattctcaggctctgggatggggaagtagctacatctctggacgtgtccagcaacgatcaccaaagttttgagacattatttcagactcttgaagctcagcatgttcccatgggccatatttctgatgttcccagagattacaaatccaaatggaatgatcattccatagtgttactgacacccaaagtatggccacgcatagctggaaactaattaccttattgatcttcaactgactgtggcctgaacagttagagtcagttctgtgaatttctgtatgccccttcagggagaagagaaaaaagcctccagatagggccacaatagggaagacagaagaatgatgttgggctgcccagaatcaagtggacaagggtggcaccaaaattttctggttttctctggagttgcccagcgagatcctctgctctccaacctttagggtgagaatctgctggagaagccacgggtggaaatttccgaggctagtgaaaccactcctataaacctttaaaaatgtatcagggaagaagggagaaatgaaaataagccaaggttgcagcacattcaacattaaccattccatcagcttgctctctgacccgcttttttatagttgttttgtgctgattgtcttcaaataatgggggttcaactttttggctccctgggccacattggaagaagaattgtcttgggcaatatgtaaaatacactaacactaatgatagctgattagcaaaaaaaagaaaagaaaagaaaagaaaaaaggtccttgcatgatttttgtgatatctgccaccacagataagctaaaaattccttgcattcaaagactcgaacacctgtgaaccctgttacaagattataattccccttaactactccatagataacaacttgaacattaggaaacattagggtttccctttgagatattccttgagatccggcataccaatgaaactactgactcagctggtctaaagaatgccacaggagctgactcatcaaagaatgcaatttccacatcctgatgattttgtctccctaaccccaacaaatcaatggccccaattctccagccccttgccttccatgatcttaaaaatcccagccaagaacttctagggaggtggatttgagagtccccttccatctcctttcctggcgccctgtaattgataaactctttctctgctgcaaacgctgctgtctcagggtaatgagtctgttactgcacagcaagcaaatgaaaacctcttggtcctataacactagtgagcctgcaagttcatgggcagctgcttgcaaaggttctccttggccaagagagtacacagcctgtgaagggaatagtggaaacccaacctctggagtgaaagatcaagactaagtcctctggactgagatcctgaatgacttcctgagtgaatggtagggactagacttttgggcaggaactggggggctcaagtccagcctgggtcagcaccagatctctgcagtgttgtgggtagatgtgcactggtgagggcataggggccccttggttctacctgggctaccctgccctcactgtgggctgccatgagttgtctgggcatgtgtagtcatcaagggtgttgtatctctcctcgccaccattcctagccagactcacacttcctctctttctttctctctcatggttccctatgaggtgtgaccacagatcagatgtggatagaacctaatggtcaacaccagagtcatataactccctgttttgcatgtgctttctttaaactagccaattcacaacccccacaggaaagcataagggataatggacctgatagggtttggatttgtgtccctccctgaccaaatctcatgtcaaattgtaatccccatgttggaggagggtcctggtgggaggtgattggatcatgtgttggggggacttcccccttgctgttgtgatagtgagtgctcatgagacctggttgtttcaaagtgtgtggcacctttccctttgctctcttcctccttttccagcaatgtaaggcatgcctgcttccccttcaccttctgccatgattgtaagtttcatgaggcctcccagccatgcttcctgtacagctacagaactgtgattcaatgaaacctcttttctttataaattacccaatctcaggtagttctttaaagcaatgtgagaatggactaatacaggaccttaaggcccatggaccttggcaaaggtctaatcccacaagtccttctcccctccaccacccccgacccgctgcacctggtagttgagctccttttgcctccagacatcctgttgcctccccctcccctgccattggcaagcctaatgtttctgggacttgtgcataataaatgtattctgtttcatgcgtcttggtttcacttccttattgtgtctcacctgacacacacctgaatgtaacttccacctggtcagagctctcctagagagtggctgtcttggccaatagccactccaacagagggatctcaagaccaaatagaaataaaccataacaaaaatcataacagaggtaaagatgttgggtctgtgatgtctactagacatctaaaaataggtcacaaatacaatattcttttactttaaaattttttttcttttgttctacacaaatacaaagagaagacaagaagaaatacaatattagatatatgaccatggagtttggaagacaagcctgagatggagatatacacataattttttggcttgtagtggtgtacttgcagccacaaccttggatgagatcaccagtagaatatgtgtagattgagaaatagatcaatttggagagaattggtatttatgcatggcgtctactatttctactaaaaatacaaaaattagccatatgcggtggcacacacctgtaatcccagctcctcaggaggctgaggcatgagaattgtttgagccaggaggcagaggtcagtgagccgagatcacgccactacactctagtctgggcaactgtgtctcaaaaataaaaaaaaagggttccatctccaaatgcggtcacattctgaggtgctgggggctaggacttcaacacatacattttggggagacacaattcatttcatagcattgggaaatataacatacatatagaaaattatttattatttatgtagattttaataaatttttcttaagttgatactgatgtaactaccactgaaggcaatacagagtattagtgtgctcagagtcctgagtgctctgtctgggtcacaatgtgctcctccctcaacacccagatgaattcaacatcccgatttttaaaatcagtattatctgactttttaaatagttttttctattgtgtatgaatctccaaaatatagcttatatgtggctgttactgacctttacatgaatggaataatatgtgctctgtttggtttgatatcttctgcaaaataaatgtaagattcactcagggtgttccatgtatccatgtatctctgtaacatccattttcattgccattgaaggaacaatttatctgtccaatcttttgttgatgtgcctttgtattgctttcagttacttgcgataatgatgttgctgtgaaagtttttgtccatatattctgatgtacataagaatggctttggttttttacacttttctttagcatctctcttgggaagatataaatatcttaaatgtttatgttttaatagcagaatttcaacaggcaaaaactgaccaaaccaaaggataacagtcaaattacaatcacaattggagatattaacacttctttctcacttattgttagaacaagcaggcaaaaaacaagagtgcaaaagatttatcttgatttagtggcatttgcataacactatatccaacattatttgaacacacattctttttctagtgaatatggaatgttcatgagggcaaacatactgggtcaaaaaataagtctcaagaaatttccaaagattgaacacatacagtgtattttctctggctacaataaaattaaattagtaataaataactgagatatctagaaagtcttcacatatttagaaataaagcaaaacgtacttttatataaccaatgggtcaaagaagaaataacaaggagcattagaaagtattttgaactgaatggtgattaaaacatgacaaataaaaacttgtggaatgcagtcaaaacagtgcccaaggtaatattgcaactttcatgtttatatttaaaaataaaaatatctaaaaataatgattgaattttaaatcctaaaattagacaaatagaaaaatgggctaaatccaaaggagaaataaagaaatagcaatcgtaagagtagaaataaaaagtatgtaatagagaaaattaacaaagctcaatacagatttttaaaagagattaataaaattgataaatctctgccaaaattgatcaagaaataagggaaaatttaaattactaataccagagaaaaaagcaatgccacagatctggcagacaatgaaaggataataagtgattatcaacatctttccaggagggaacttgtaggtacaaataattttcctggtgaattatgtcaaacatatacagaaaatattttaccagtgccacacaaactctcagaaaatacagaaggaggcaacttttcctaattcattctatgagactagcattaccataacaccagaaaatagtaataaaaaaatgtacagattaatatccctcacagacatagatatgaaaaccttttaacaccacttcaggaaatcaaatctaaacaaatataaaaggttgttctagcatgtccaaatggagtttgttcctggaattcaaggctggtttcatatttaaaataaatcaatgtaatttaccacactaagagaataaagaagaaaagccatgtaagtatctcaaagaggtgggaaaagtgattgacaagatttaattgcttttcaaaaaacaatatctcagcaaaagtaggaattgaaggaaatttcttttgtctcaagacaaaagcagagctatgaagtaatcataaggaattatgccttgagacacacagcttttgtactagagtggatcctgcacccaactgatgagcagcttgtgttcttgaatctgggaacagataggttatagacagctgtgtggtttgctgcaaggctcagtgagaagacaaatgcctgatggggttctgctgacaattgttgatctccgtcccacatcttttaaggagactggagcccagtgtggcctgtgggtcccttatgagttgaacctttagacctcccagtaggcagtggctgtacttattacagatgtgcatggtgctaagtactctgagaactacaaaaatgatcatacttgatgcacatatgatggggaggcaccacagtcaggtggttaatgcatgagctctggaatcagacagaatgggttcaaatcctggcttctccactaccttatgactgacctgagaaaggttctaaagttgcaaaaggaagtgaaaccaaatttgccaaaggaagttaagagaaacctgtctgccaggaagagatattgtggagtgtggcatctgggcaggagggcactctgcccccacctcagaacactttgtatcccaggtgatgctggggactcaggcctttccaaggtggccataaagaaggctcattttgcttcaggatttggacaggtgatagacagatcctgttttgtttgtttgtttgtttgttttaaaggtatccccagactatatctaccagcatggagatggggtagggtacagaggcaaacagatgtcctctgtggtggctgcctaaaaggaagaggctagggtaagtttagcacatgccctgttgctgccatcctgagcctcctgagtgcctcagtatctgcaagactgagcaaaaccctgtttcttcccatccttgactctcttactctgacctccagtgagctgggccctcactctggcacaatccaggttgctccagccctctgactttgagcagattctgccctcacgtgactcacagagaaagggctagtggattcccaggcactggttgctgaagctgcctctccaggccaggagttgagaagcctgcagtcctggtgccctggtggagccagctctgctggaactaagtacccacagtcctgaacagttcccacgtagcatggggccccatccagtggcaaacatctgcaactagcaggtggaagttccaaaggaacagccagaaagtctcactggggaaaggcccctgggtttccacctttgccctgtggtgactttccttcacatcctttgcagtgcaccctctgtcatgtagcccagggaggcatcacaaatatcaggatgaagagtgcatggtttgccttggaagattaggtagctaggaagcatctccaaactgcattctacatcctcagtatcagataggtatgccctgcttttcaagggcaatgcttttaggaagcttctcccccagcctcactgaatgccagtcccctgactatcaccccactggttcatccagaccactgtgctcctccctcacttctacagatacctcagtcttcactgactaactgatatggtttggctctatgtccccacccaaatctcattttgaattgtaatctgaattgtaattcccatgtgtggagggagggacttggtgggaggtgactggattgtaggggtggtctcccccatgctgttctcatgatagtgagggaattctcatgagatctgacggtttataagtggcagtttcctctgcactctctcctgccaccaagtacgacatgccttgcttcccctttgccttctgccatgattgtaagtttcctgtggcctcccagccatgtggaactgtgagttaattaaacctcttttgtttataaattacccagccccacatagttcttcatagcagtgtgaaaacagatgaatatatcaacccatcattaactggccaaccttatcacttccactgcccagtcagcccatctgcagacttgacctcccagcctgctttgaacctttgagatgaccgacatggacactactattccctgggtctcatctcctggtccccccaggacccagggttagcctggaagactcaagctctgggctaggtttcctctggtcttggaactcccatttgactggctcattgcagtgtggagtggacagccccctgcaaaaggcagtccccactaacccacctatgtttatggtaaacagccctaccccactttgaacctttcctttagcccagaagccacctctcagtcacatttggagctcctaaagggcagcagcaaagagtcagtcttctaggatacctgtctgcaccatcatacttatcactacttcagcaattgtctgttttctagtagctaggaccttgaccaactgggcagccaagtctgcctttaactctgatgaaatcaatatggttaccatgtcctctttctagcctccccctggcaggatcccccaatgtatttgatagcatttaccctttgagaaacgtaaaatctcaatacaagctctaaactgagcctttactgcagcccagacacccaatgggagcataatgccatcagattttgcgtacgtgttacctccatatccatctttgatatctctgctagcacccactcagccttgggtggcacctcgggtccttttcccatttgcacagccactacttctagctctggagccatcactggatgctcagcatcaggcacagttcaccttttgctaacccctctctcgacccatttccattcatggactctggggcttctttggataatgacagctctaggaccagtgtgtctgccccagacccagctccacatctgaagcactcagctttagaacagggcctagaggggcatgcagcaccttagtttatgttggggaggcttacacatgagcaccggggttcctgcaagcctacagcacctctggtacagttggagagggcagtactactgaaagcaaaaactcctgggaaacactttcctccctgcctacagtcagagcagctggggcctgtcctgccaaagcacacctcttagaacatcactgagaagaaacatgttccagaaggcacctctgttccttcttgtgttcataacacctggaaaccatctggccaaagcacgtctgttgtggttggaggagcccgcacataccagtgcttgggacacttctgtcttgcagacagaccacctggaatgcagctggccagagcacatctgcatccctcaaagggaaggagaaagcagcacatctatgcttggaggcctttatgtttccaccacaagcagagcaccctgttgcacctttccaagcacctatgttgcagtagcaggggacaacacactacctgtgactgcaagtcttctcttcttgtgtctggtcagagcgcttggggcccatatggcctgggcaaacctgttactgctggagaagcctgcacaacagagaagaaacatgtgccccaagatacttctgttcatgacttctgtcaaacgcctttggaccactcagcttgagcacatctgtttctgttggaggggctggtgccatatctgtgactgaagaaactactgtttatgaatacaatcagagcatgtgagggccataagtccagagtataggcagtgcaatgcctgcaatgggaggagatggcaccatacctgtaatgggaggagatggcaccatatatgggtttgtttgggggggacacttctgttcatgaacacagccagaacacctggggtccacaagtcctgaattcaggtgtacaatgggaggaaacagcaccccacctgtgcctgcagaaacttctgtccatgaatagtcagagagcctgaggtccacaagtccagattaaagatggtgcaatggcaggacacagtcccacacctatgcttactcgcgaatacagccagagtgcctgggttccacaagtgaggattcagatggcaagtagagggtacagtaccattcaagtgtttgggtacccttctcaccatcattcagagcaactgggacactggtggctggagcacacttgttgcagtcagatgggagaacatgttgaagaagatacttccattctcaccttcaatcagaacaccaggggcctaagccagggtaccttccctctttcattttggagaaaacaacatcactgagaaaatatctgtgcttcaggaccttttccacctgcttttgatcaggtcaaatgtgcttctgtggtgggcacggcaagcacagcctcgtctttggggcaccctcggcacctgcacagggattctttggggacagaagcatgcagcatcaccctatttgttttcttctcatgtaagacttagggtcctcagtgaccaaaagcaaaagcttcctctagaaatggcaggtgaccactgttccccatgatttgatcttgttctgctgggagcagtttctgctccttctagttacggcaaacaagcttcacctgccctttgtccttctagcacaaactggaagcccaagaccctggggtgtttgtgaatgtgtccaaggacttgggttcagatgagccaagtcagaagtcgacacactagcctaagatgttcacctgtggagagaagagagagatgggtgagtatcagccgtgcaacactacactctagtttcagtgttatcctggaagacctaagctttgggggggtttcctcctgtcttggaactgtcaggacacccactgctatctatgtctgccatgtttcctctgctcatgtgtttttgctctaactcaatgatggagaaaatactgacttgtataagccatgattgttgagccaggcttaactgtgcaaagtttctgtggcccagggcccaggatctagaacatggagtttaaatgtcttttttgcttgtttaatttagttgtatgccagtaattcacacacattcacaattttttttttggctgcagggggttgtgggggagagatggggatctcatcatgttgcccagcctggtctcaaacttggctcaagtggtcctcccgccttggcctcccaaagagttgggataacaggtgtgagccaccacgtccagcaacattcacactttcacctatggatgattggcttggcaatcaggcttttgggcctggaggaaaaaaggaagaaagaactcacgcatgactgctccgtaatttaaaaaaaatttaagtctgttaggatgtaatagattacatagatattggtatcatgttgctttgacacattacaaatgattatcttttaaggtaaatagcaggataggttctatttggaaaaataactggtctatctcgagtcctaaccacaaaaatatcgtcacaagatttataatttcacacagacttggctgaccttggagttgtactgtgctgaaaatacaatctttttaaagtattttacaacccatgaaggtatcttaagatggtggaaagaaaaataaagtacaagcatttccttcagctgcttacagattacagttgtcccttgaacaatgcgtgggggtaaggggtgctgcttcccccacgcagtccaaaatgtctgcatgacttgtgacttccccaaaacttaaccactagtagcctactgttgactggaggcctcactgataacatgaacagttaacacattctgtatgttatatgtattatatacagcatacttacaataagctagagaaaagaaaatggatgagtggatcatcataaaggtttcatccttgtcattttcatgttgagtaggctgaggaggaggaggaggatgaaaaggaggggttggtcttgctgtctcaggagaggccgcagtggaagaaaatccacatgtaagtggatctgtgcagttcagacctgtgttgttcaagagtcaatgtattatattaaacagtgctaggtcttggtgatatagaattcaaagatttatctcttgcagcccagcaatttacagtatagcagagagagacagatagataaaccaaatattacacctggaaagatagtggtggcgatacgggagtaggtaagaaggacataaaactaggtgtgagagagatggaaaaaataaaaaataataaaaaaaagaagaaggaagaagtgtccaggcagagaaaggctatttgggggtcaaagaaatagcatgctaaaagtcagggaagactaatctgtgtaacaaacctgcacatgtatcctggaactttaaattcaattaaattaaattaaaagtcaaggaagaaagagatcatgaccctgtgggacaccaggcaagtaatcaaatgtggttggagagtgaaacccaagctgggagatgtggctgctgtgttcagcaagtgcagatcatggacaaacagacataccatcagggggcatttgtccattatccacaaagtatgaggaatcgtgaaaggataagcaaagaagttacatgatatatgtagattttagaaacactctatgcctccctgaaaggaagaattaaatagatgccagaatagaagcagataggcttaggaaatttttttgcagtgatccaatgcaaaaatgagccactgagctcccagtctagaggaactgacagtgggatggttgaagaggtaagggaagaggcaaggggaagtaggcgatgccaacaagaccagggctattttagccatctggtttagataaacggacatgagttgttttggaaaacatacattaagttaactttctaatagtctgacatggctatggaagacgtaggtgatattcataaagccattcatttacccatttagtcatcagttgggcatatatattattatttgagacaaaatgagtagtctaaggaatactttaggtaatagcatcaattttttaaaaacaaggataaaaatcttatgaaacctaattctagttggagaaaataaaataaacaacaaatgtaataaattagtaaattatttgataggttccagtaacaactgcagggagacgaagggcagccaacgtaggattgagtttagggctagagagaagtgtgagtttctatttaaatagactggaaatggtaaacctcattgggaaggtggaatctgagcaaagtctagaaggcaacaattaagcaaaccacacagttatctgagggaaaggcattccaattagttggactagccactgtaaaggctcagaggaaggatgtctcttgcccgcagggagcagtgagcaactcaataggggaccaggatgaagttggcactttgcagagtgggaagaagggggaatagagatggagagggatgaagagactaagtggggccttggaggatgtgataagaacattgccttttactcacagatggaaatcatggagggtttggagcaaaggatgacgtgatctgactgaggcttaataggatcattctggtttctggggatgagagaccatttaggtggctatggtcataatcatgaaagcttggacacagtggtggtggtgcaggtgatgagaagtaaaatttgtagatattttgaagcattttctgttggcctgaatggcaggagtatgtgtggaaaaggaagaaggaatccatagacttgctatttgagtttagaaaaggttttggcctcatcaaggtatactcggtcactgggcgtgtgaaaaaagatggccgagggagaattcctagaaggggaaaatagggagggaggacatgggaggataacagactcctaaatacatgtggttgagttcattggttgtgcatatggaaattacccctacctcaaaccatcacacaaatgatgaatttaagatatcagataacaaaaaacatgaaaaaaactaaatccaggtacatcataatcaaactgcttagtctctaggagaaaatcaaaagacatcccaagaaaaagcacacattatgtgttccagtagaacacatgcattgttctaatgagaaacaaagaaaaagtaagatgtagctacagacgaatgaacaaaacttgaatatattattttcaaaagttcccccgaaacagaatatggcacacctctcattggaaatacacaagctagaactcaatgagttagcattttttaaaactcgaaagaaaaaaatactgtgaacctataccctgtgaacctgccagaatgtggagacacaggtgctaaaactacacccagtgaaactcttttaaaagtgaaggtacacacacacacacacacaactcaacctttttatacacgtaaatgcttatcgctagcatacctttcattaaaaaaaaaaaactaaaggaagtccgggcaagataaaaatagtgcaagttagaaatctggatctacacaagcgaatgagtagcaatggaaaaagtaaatataaaaatatatgcatatacatacatatgtgtttgtatgggggtgtttgtgtgtgcatgtcaaacactttctgtaaaagtaaaatgtatggcacaatggcacaaatgataagagagaaatggaagtgtactgttcttattgtatagttcttatactatatgtgaaacaatataatattacttggaggtagactatatatgttactctatatagtttatactatagtatgtagtatatcctatataatataaagaatcactttaaaaacacttaagaattatatttagtaggtaaacaaaagagataaaatggaatcatgaaaataatccaaaagaaggtatacaaagaggaaaaagaaacaaagaccagatggaacaaacaggaagcaacagcaaaattgtcagtgtaaacacaacgacatctaaccatattaaatttaattgtctaaatgtatgattttaaaggcagagattgttagattggattaaaaatacaaaactatatgctatgtataaaaaaaacacttgaggctgggagcagtggctcatgcctgtaatcccagcactttgggaggccgaggcgggcggatcatgaggccaggagatagagaccatcctggctaacacggtgaaaccccgtctctactaaaaatacaaaaagttagctgggcatggtggtgggtgactgtagtcccagctacttgggaggctgaggcagcagaatggcgtgaacctgggaggcggagcttgcatgagccgagatcgcaccactgctctccaacctgggcgacagagcaagactccgtctcaaaacaaaagcaaaaacaaaacaaaacaaaacaaaacaaacaaacaaaaaagacttgaaacacaaaaacgaatataactgaaaggataaggatggaataacaccaatgtaaagaaatctggaatagttatatcaaatggagtagatttcagacaaagaatgtgataaggaataaaaagagttatttgataatgataaaaggattaattcaacaataggtcataacaatgctaaatgtttttgcacccagtactagagcttcacattatatgaaacaaggctgataaaactcaaaagagaagtagcatatgagtcaaagaaatctcaagaaaaatttaaaaaatattttgaatgaaattaaagtgaaaactcaacttagcaaaatttgtggcacacagagcatatagttcttagaaggaaatttatagaaatggatgcatatattagaacagaagaaatctaaaatcaatctcaacccttaccttaggaaactacaaaaagaagagcaatttaggtccaaagtaagtgaaatgaaaaataattagagcagaaatcagtgaaatcgaaaacaggaaaacgatagaaaaaaatcaataaaaccaaaattgactctgaaaatatcaataaaactgataaatgtctaaataaaataaccaagaaaaggtagagaagacacaaaaaggagtatcactattgagtcacagatattaaaagcataacaaaaatattagaatgccacaaatttgataacgtagattaaatggccaattccttgaaagacacagtctgccaaaaggatagagaatagaaataagcctgtatctatcaaagtaattgaatcaacaatcaataaccttccaaaacagaaagcactaggccctggtgcttttactggtgaattctaaatatttgagaaagaaattaagttctttacaagcagctctagaaaaccgaggcagaggaaaaacttcctaactcattctatgagaacagcattatcctagtaccaaaatcagacaaatccattgcagaaaggaaaactacagatcaatatctttcatgaatataaatggaaaaagcctcaataaaatattaacaaatcaaaacaaaaaatgtataaaaagaattatacattatgaccaagtggaatttattccaggtatgcaagtctgattcaacatttgaaaatcaattaatgcaatctatcatatcaacaggctaaagaaaaaaagtatataatcatatcaatagatgcagaaaaagcattggagaaaaatccaacacctatttgtgataaaaagctttcagcaaactaagaattaagagtagaatattctcaacttgataaaacatctaccaaaaaaacctacattatatttaacggtgataaactaggtgcttttcttctaatactgggaacaaggcaaggacttctactcaacatggtaatgaagcaagataagcaaaggacggaaaatatatacagactgggaaggagaaataaaactgtcatttttggcagatacataattgtctatatagaaaacccctaagaatcaataacaacaacaaatgacctctaacaactaataagtgattatagtaaggttgcaggatacaagattaatacacaaaagacaagtgttttcttatgtagtagaaatgaataattggaatttcaagttaaaaacacataatacctataataccatttacattagctcctccaaatatgaaatatgtaggtataaatctaacaaaatatgcacaagatttatatgaggagaattgtaaaactctgatgaaagagataaaaaatctaatcaaacggaaagatattccatgttcatttttagaaagactcaatattgttgagatgtgatttattctcaaatttactgtatttcaacaaaatcccaatagaaataccagcaagttactttgtggatattaacaaactgattctaaagttcatatggagagtccaaaggaccagaatatccagcgcagtattaaagaacaaagcatattgacactacccaacttcaagacttactataaggctacagtagtcaagacagtgtggtattgaagaaaaagcagataaattcattaatggaacagaataaagagcccagaaatagaccatacaaatatagttaactgatatttgaccaaggagcacaggcaattcaatggagaaatgatagctttttcaacaaatggtgctggaacaactggacttacacatgtaaaaagtttaacttggacactgaccttacaactttcacaaaaattaactcaaaatctaccataaacccagatgtaaaaattataaaacttttagaagataacaggagaaaaatctaagcgatctagggtttggcaataactttttagatacaacacaaaaagcttgatccatgaaagaaaaaaaaagataaattggacctcattaatattaaaaactactgctcggtaaagactattaagagaatgaaaaaatgagccactgactaggagaaaattatttgtaaaacacatctctgataaaggactggtaattgaaatataaaaagacctcttaaaattcaatagtaagaaaacgaacaatcaattaaaaagtggccaaaatctgaacagacacctcaacaacaaaaatatacagatgacaaataagatatgaaaatatgcttaacatcctgtgcttaggtaagagcaaattaaaataatgagacaccactacttacgtattagaatggctaaaatccaaaacactgacaacaccaaatgctggtaaggatgtagagaaatggtatatccacttggaagacactttggtggtttcttacaaaactaatcatactcttaccatatgattcagctattgtgctcctaagtatttacccaaatgagttgatatctatgtccacataaaaacttgtacaaaatggctgggtgcagtggctcatgcctgtgatggcttgagcctagacgctcgagaacggcctaccgcaacatagccagacctttacctctacaaaaattaaaaaattggctgggcatggtggcatgtgcctgtagtcccagctacttggcaggctgaggcagaaggatcgcttgagcccaggagttcaagggtgcagggagctgtgattgtgctactgcactccagcctgggtgacagagcaagacctggtcttaagaaaaaaatggcaacacggtttctctacggcccccaccggccaccaggaccagaagcagctgcgaagccagccttccccagtttctccctgacagcgctgggttcgcccttccccaccacgaagagtgtccataaggagagctccaccttctctgactgaggccggaggtgcacacaaaggcgcagatcctggagctgctggtgctggagcagttcctggccatcctcccagaaaagctgcagccctgggtgcagaggcatcatccagaaaatggagaggaagctctgactatgctggaggatgtgcagagagcgcttgatggaccaaagcagatcttcttttttggacgaaggagggacacggttgcagagaagctagcaccttcagaaatcactgagcaattgccaactagccagcgcacgcccgtgaagaagcagctccagcgagaatcatgggagctgcagtccttaagaccacatgatgaagacatcaaaactataaatgtgaaatccgcttcaaggcaaaagacttcttcaggcatagaactgcattgcgatgtttcgaacatcctcggtataaatgcctcccagagttccacatatagaggaatgtatgaacaagatgattcaaaatatgaacataggattgcagagtcccaaaagaatatgtacttcaagactaggctgaagtgtcccaggtcactgtcaggaggcagataaataaagggccttaatctcttatgaaagctcacaagaccctccatactattgatgatatcaagttaatttcctgtgttggaaaaaaataatctcctttgcaatgtaatttggaaataactcaatggaaacattaaaatgactgcatgtctacaagcagtcacctaaacataaggaatgttttcataatgagcaatatcattctatgggtgcttctgtaaggtggatgatcaccttaacataaaggaaaaagggagatgaacaaaattgtcaaacaagactgatgtaccacaagtgttggcaagtgcagtgtgtgatggagaaatgtaccacagcttaactggaagagcaagcccttaactgctgatcacaatgcctcagtgtccccttctccagcataaatcagcatgaatatgtttcaagcatcacaagacaaccttttcagagtctcctgcattcttagtaagatgagtttctagacatgctctcatgaaatgataccctggattttgatgttcttgtacatacgaacaaatcactgaagttcaatttaaagggtccactgcagtcctttataaacaattgttgaacctaacctttatagttaataagttttaagacaacatttttgggatatcttatttggcttatctatgagatatgagcacctataagttttacctgtatttaattcagtcagatttcctgtttaaaaataaaattactgacttgtacattattaaagttattttgacagtataaacacagcataattatctcttttccagagattcttgataaaattctgtaatgttattacaagaatacatgtattgtgttttccatggtgctacagttaaccaatatggaggcaaacatcagaaatcaaagcccttggaaaaagggaagaggatcttagtcaacttctttggttgggttcctcatagagtgtaaaacatttcattctcagaaaatccaaccatatcttagagtagctccagaaattggcttagaggagctccggaaatgtggagtgaccacactctgcttagttagtatgctaatacatgtaagatcagtaggaggagaaatgaatgtgaattttattatagaattttctgagagtgattatgctttatagctccagtgaatatgaatatgtattgagttgtattttcagtcattaaaaatgtaggatactttttatttgggcctcattctctttgtaattaaagagaggaacaagcccatctattgtaacaacaaatgcctcagagatatgtgtattgtgaattactgcttaattatggaaaaagtttcttaggttctatgccatcaactttgtaagattgcattctctttcttgtgaataatttgaatgcctccaccaggaagtggtgcgaatcatatcatctaagtatatgatgaatctttaaggggtgttgctgtgtaatttgaattattttgcagttatgtagctatcctaatgagtgaatggtactagtttacatataaggagaactacttgagctaaccttgattttaaaaaattagcattagcacccccattatattaattttcagagatagtaaatactccaaaatgaaacaaacaaaaataacaacaacaacaaacaccttgcacatgaatgtttgtagcggttttaatcataattgccccaaattagaagcaaccaaaatgtccttcaaaaagtgaatagataaaccaactgtggtatatctatgcaatggaatattattcagcaatatgaagaaatgagctgttgaaccatgaaaagagatggaagaacattaaattcatgctgcaaagtgaaagaagcctgtctgaataggttaaatactgtatgattccaactatacgacatttggaaaggcaaaactagagacagtaaaaagatcagtggttgctaggagtttgggggaggaagggattacatggagcacaggagatttttggggtagtgaaactattctgtatgatgctacagtatgggtacatgacattatgcaattgtcaaaaaccacagaactgtatgacaggtagagttaaccataatgtgtactatagactttagttaatatattaatattggatcattaattgtaacaaatgtaccacatgaatccaagttgttagtaacaggataaactgtgtacgtacgggtggagaagatacacgagaacacactgcactttctcctcaatttttctgtgaaactaatactgttctaaaataaagtttgttaatttaataaaaagtaagattacagaagttgtaacttgactttattggtatttgtaaaacatataacccaacaccagctgaacacatgtttcttttcaagagcacatggaatgttcattaagattgggccaaaaaataaatcttaataattttgagattaatatgttttctctgatcacaatagaatttttgtagatctatctacaaaattgtagatatctacaatatgatatctacaaaatcctaaaatttacagattaaatattaaataaataaatactataataaatattaaatttaaatagttaaatatttaaaatactcatattcatatttagaatgaaagcaagacacacttttatataatcaatatattaaaaaataacaaggaaaaatataaaatattttggactgaataagcaaaacacagcaaatcaaaatttgtgatagacagctaaagtgtggcagctttaagcgtttatgtttaaaacagaaacattttaagaaacaatgatttaggtttctaccctgagtagaagaatcaaggaataaattaaatataaaatgaatggaaaagaagaaataataaaaatagacacggaaatagaaatgatagagacacattaattctattaatttctatttatagacatttctatatataatatagaaattataaagtgtaataaaatggagaaacctctatcaagattgaagaagaaataacaaagagaaaactcaaattaccaatattaggaataaaaagggaagggcatgagtcagatctgaaagacattaaaagggtaatggggaattataaacatcctctaagaaaaaatatgcagttccagacggtttttcaggtgaattctatcaaatgtgtaagaacaatattttacctgtgttacacaaactctttcagaaagtggagaaaggggcaacttttcgtaactcattctataaggccagtattactctaatatcaaaacctaacaagaagagaaaattacagattaatatcgctcataacatagacacaaaagtctttggcaacactttaggaaaaccaaatataaaaagatgatcttttgtgactaagtaagtttttccccaggaaggcaaagattcatttaacacctaaaaatcaatcaatgtaattcatcatattaagagaataaaagagaaatgtcctatggtgatctcaatagctgtgggtctcacaccacttaccaaaaacattctaagtaaagcaggaattcgagagaattcatttctgtgataaagcatatctacaaaaaatcttcagttaataccatactgaatactcttaacctatgattaggaactgggaaagaatatccattgtctcttcttgtatttgatagtttcctggatgttgcagcaaatgtagaagataagaaaaattaataaaaggcatagagattaaaagagaagaaagaaaagtgcctttaagcacagaaaacgtttgtctatgtagaacatctgaaagagggctgggcacagtggttcacacttgtaatcacagcactttggcaggccgaggtgggcagatcacctgaggtcaggagttcaagaccagcctggccaatatggtgaaacctggtctctactaaaaaaacaaaaattagctgggcatggtggcacatgcctataatcccagctactcaggaggctgaggcaagagaatcgcttgaacccaggaggcagaggatgcagggagctgagattgcaccactgtactccagcctaggggggatacagcaagactaaaaaaaaaaaaacactaaagaatctacaaagaaactacaaaatgtaaatagaaaatgagcaaggtttcaatacaaaagtaaatatatcaaaagcagttgttttgtccatatactactatatgccaatatatgtatatagtacgtgagtacacacacacacacacacacacacacacacacacacacacacacaccccatcatcatcatcattttcaggggctagggaagttgatattggtcaattatcaatctcacccagggccctgacagctggcctatggaattattgcaagtgatattggtgcccttggggcataaagcttttaagctagcatggatcttgtatctacctgatgtacatcttatgtcctcgttcctgggagaagacagctcacagacagctgagtttttggctgcacatcctacttagaagagaaatgcctgattgtgccatgctgacaagtgttggtcctggcaaatacagaaggaaataaagagaaataaaaagcatgtagattacaacagaaggaaaactagctttattcacagaaacatgattcctagaaacattattgtgtatgtagaaaatcctatggaatctgcaaagaaactacctgaaatcaaaagcgatttcagtgaggttcaatatacaaactcaatatgtatgcatatatacatttatgtacatacacagtcatgcacctcataacaaggttttggtcaacaatgaactgcatatacgacagtgttcccataagataatatgacattgttactgtttcttttctgtgtttagatatatttagatacacaaagacttaacgttgtgttacaattgcctcaaattcagtatatgccgtacaggtttgtagctacaggctataccatatggcctaggagtatagtcaattataccatctaggtttgtgtaggtacagtctatgatgtttgcacaatgacgaaaatcacctaatgatgcatttctcagaaggtattcccattgttaaagcgacactggactgtattatatgtattacctatattctaccaatgaactatcaaaaattaaaatttaaaagattccatttacaatagcatttacaaaccccatagaatacttagaaataaattagcaaaagctgtggaagatctatgcacagacaactgcaaaacagttgcaaattttctcttaaaaagccagatagtatgaggttggtacaaaagtaattgcggtttgaaagtaatggcaaaaaccacaattacttttgcaccagcctaataagtagcatagcctttgtgggtcacgttgtctgtgacacagactctttgtgtttctgtgtattctgctgcaactctttaaaattgttaataggatccttcactcactggccttacatgtaggctacaggctaaatttgttggcccataggctgcagtgctgacccttgctgcgaaatatttctaggagaaaatactcaagacctaaatctatggagatatatatcatccctgtggcctggaaaagttaatattggcaagttgtccatcttggccaggaccctgaaagatagtctatgttattgtaagaaagattggtgtccttgggggcatgggcttttaagccagggtggaatctgcagaagtctgaggtgccatttcctgtccctatacctgggagaaaatagctctcagacagctgtgtggctttctgcaaagctcaattagaagagaaattatcaggcgtggtggcgcatgcctgcagtctcagctacttgggaagctgaggtgggaggatctcttgagcccaggagttcgaggttgcagtgagctgtgactccagcctgtgtgacagagtgatacgctgtctggagaaattcatcatggagatatgctgataattggtggtccctgcctacatcctcccaggagactgagccagacccggtgtggccaatggtccacttataaattgaaccatgttagacctcctaacagtgcaagtactcattacagctctgacatggtgctaagcaccccaagtattataaacaagtgtaatccattatgcacacacggtgaggctacaccaaagtctggtggttaaatgcatgatctgtggaatcagacagcatgggttcaaaccctggctggggtgagatggggaactttctaaggcttaaatgctgttttaccaaatattttaaaagaagtgaaaatacactgcctgttagaaagggaagttttggggtgaagcatgtgggcagtttagaatacctggtgtccacctcagaaaccatcacagcccagatgttataggttcaggcctttccagggcgggcacatagaatgtcctcgcctccaaggtttggagagctgcgctataaaggttcttgcaggcggtgtcctgagcccagagctgcctgcaggcgggcaggagttgtgggggtgttggcatgatctggtgtcctctgtggcggctgcctgaaaagaagaggccgagggttctttgtcctatgtctctccgaatcttaatacctgccctgcagcagactccctggctgccagggcacaccggtcaccccggtagacggtgccgccccgccctcgccaaccccttatcccaactcccatttccagccttccaggaagcccgatccccacccccgcaccatgtgagctgctcctctactccgcgtaggggaggctctgcctccggtgaccccgagggaaagagctagagcacccacaggtgctgactgctgcggcgctgaggacgctgcacacccgttcaccggctgacccagtgctgctgacaaccagcgtccgcggcccccaaccgtcgaacagagcgcgtgggaccatctggtgccaaacgcctgcaacggagtgcagaaggtcacgaggcgctagagaccggttgggggcaggcggttgggccttgacgctctttgctgggcgtcgttttttcttctcgcccccttcgctcctgtgcgcttagtgcacaagccctgggctcacacaccctttctctgtcacgtgttccaacagcatctcacctgcatcgggctgaacaggagacctcaattttctcctctactccaaggattcgccggctcacaattgctcttcatatcttcagcaagctttgtctgtgccctgcccctctgtcccccattgcctaccatacccgctcccaccaagcctgcatcacctcgctgtctctgtgcctctccccggcccccttccaggcctttctcccacaatttctggtctttgctcctgggtgttccgtcgaccctaagaggcggtgtctgatctggcaggctcaatgcctttctctggcgctgtctgcacctccaatatattcagtgactcaggaaggatccatcctgcagggcccagatagactctcctgtttgccacctgagcagaaaggcacctctgtgaggtctttgccacccagtcaccctaccagacccaatcagcacgtgggagacgtggatgacaggaggacagagatggagagggaccaaaagactacatggggccttgaaggatgtcataagaacgttgccttttactgagagatgggaaccatggagggtttcaaactgctgagactggcatgatatgacttagggcttttttgtttgtttgtttgtttgttttttcttttttgtgacggagtctcagagtcttcctctgtcatccaggctggagtgcagtggtgtgatcttggttcactagaacctctgtctcccgggttcaagacattctcctgcctcagcctcccgagtagctgggattacaggcacccaccaccacgcccggctaatttttgtctttttagatgttttatctcagagaaagagcttccatgttctctaactcttgtaaacaggtattcttcaagaaactttacaatataacattcatacacagaagtgtacaaatcatctgtctattcctcaatacatttttgcagaatgaacaaacctatgtaatctagatcaagaagcaaaacacaggcacctcagaatcaacctcatgctcattcctagtcactatgcccctcccaaatttttaacattatagattagttttgcctatttaaaaactttatataaatggaaccctaccatgtgtcctgtttgtggctgtgtcttttcattcaacacttcataaaattcatccatgttgttgcttttagcagcactttattcttttatattgctgtgtgatgttccattgaacaaatataatttacccattctattattgatggatgtttggctattagaaataataatgctactgtggctaggtgtagtggctcatgcctgtaatcctagcagtttgggagactgaggagggaggattgcttgagaccaagagttcaagaccaacctggccaacatagtgagacccccatctctctttaaaaaaaaaaaagaaagaaataatgctgctgtgaacattcatgtgtatgttttcgactacttctgaggtaggacgcaggactcgactccagagccggggcttggacactggagcaaattgaggactagctaaaacagggtcagggtggaagcagctttccatcagacacacccaccagtgtgctatgtcagtttacatttgtcatggcaacatgcaggaattactgctcctttccatggcaatgacccaatgacccagaagttactacccttttcctagaaatttcagcataaaccaccccttaatctgcatgcaattaaaagtagatgtaaatatgactgcagaactgccctgagctgctgctctctgcgccctgccgatagagtaaccgtgctctgcaggagcagtcacagagctgtaacactgcctcttcaatagagctgtcttcttccaccaccagctcacccttgaatcctttgctgggtgaagcaaagaaccctcccaagctaagccccaatttgggcttgcctgcccagcatcacttccaatatcatggaaattttcagtgatgcctactatgaggtttattgcttaacttttcacatttagctctggaattctcctgtcgatttgcatgtcttttgtagatttatttcatgtttattgatgctactataaatcctctgaagggatttacctttggatgtagaaggcagctaggatgggaaagcacactttattctgagattaatgtaagtcagagccatgcttcactctttttgaaggctggctctctcctgttatccttatttctgggatactggctttcagacgttttacatgaaaacctgagtattttttggggaccctcttcattggcaggtcctgactctgaatttttttctcagcagccgctgaaattgctgaattttacctccaaaacttgatttgaaaaaaacgaagcaaaggtagaaagaatatcattctaaaatcattgttttataaacagattttgctacgtagatgcaattggccataataatggcagagaaggccagattttctttctaactgttataacagtttttaaacatgaaaaaggttcatttagaaaacaatgttaaggtaggggcacggcagagaatgggaagatggtcagccgggaggagcagtgcaagaagagagcaaagacacaagcactcttgtgtgcagaaaaggcatggtgaacataggggtaaaaatcactagcccttctcggagcaattccaacattatctgaaggaaagtccatggaccatgagaaccccccaccttctgagacacatatatctggactgtgggactttgacccatgttggatcagccagatcccctctccctggagcagtttgtcggcacaggaagagaacagctcagcccttggagagagagtcacttatgggtaggatgccctggcttcctatggctggcaagtgtgaaagttgattatataaattgagccattcttgttatacccaactaaaacagaattggaaggccaggaggagaaaacacactcagggcacgccaagaatgtaattctttgcaagcctagctgctgaaattgcctgctgtaacccaaaaacggttttatgtagtagcttctgaaacaacctgccggactctatgattacttttacccactgctatcacttaccaatcagaacttgccagctccccaaaactttactagtgccaatgagttgtctttgcaaaataaattgtctttgctcttttaacgaaacctctttctatttgttcttctaaaaggctgcccagttgtgtgccctgaattgcaattttcacttcccaaataaaacagtttatatttatagagatttatctctgtattttgatttcgacccaacgccctgatttgctcactgctgtgatccagttgtacctccaggttcagtcaatcctctccaattcttcaaggattgtcccaagataggttagttttggctgtcctagcttttcatataaatagggacatgcagtatgcattcctgtgcaaggattcttttcacttagcagaatgctgtgcttttgtacttttgttgtctgtcatcaggggttattttctttgatagctgagtaatatgaatacttcataatttctttttctattctcatgtggattggtatcagggatatttccatattatgcttattatgaataaggcttttatgaattttgcctactatgcaaggctttttgtgtcatgcaagcctttttgtgtacatatgttttcatttctctcaaggaaataattcagaatggaagcactgagtaagaataagtatatatttagttttatagtaagttttatgacattctttcaatgtgattgtaccatttcatattatcattgcaatgagaaatcttccatgttttcatttctctcaaggaaataattcagaatggaagtgctgagtaagaatgtgtatgtttacttttataataagttttatgacattttctcaatgtgattgtaccattttatattattactgcaagtgagaagtgttccaagcgctttacatccctacaggcattctggtggatgtgcaatggcatctcagtgtggttttcatttaaacttccctgatgattaataatattgagcatttttggtgggcctgttgaacatttctgaatcaacttttggaaagggattattgctcaaatgttttgtccagtttttttaattgggtggtttgccttattgttattctatcattattattgttaggttttgaagggaaggggagagagagagagttggtggctctacagcaacacaggtttattgccagtacaacttgcagagaggggaccagcttggtgccagagctcactgctgcttacaggctggggtaattacaggtctgggcaggaggggtctgggcccgtatggcttgctgcccaggaggatgttgataaagatgttccttgggcctttgcccagcaggatgtgataaggaagtcaggtggctgggcaggatgtttctcacagcccagggccccatggaatctttcattctgaccagggtctgtgaaatggcagggacttgcaaaatggtgcagcttggactaacaattattattaatcctaaagggagaaggagattcagcaagaatggtgaaaggagaattataagtagggcttctcgtttcatgatcaatatctgatgggggggggtaagtacaggggcagtcaggattggagggtctggcaaacaggtcagctgaatcagtgtctactaatgaggcaggagccaggatccacatgatgaaagtggccacagtcaggaagtctgaaattttctcagcagaaagggagaaagaacaggcaggctgagtggccctgctgtctgaaggggcctcagttttatcctccaacgccttggggctccactggtgctcacctctcttctccaagcctaggtcttcagcagtgactatacaggaaacctagggggcagaggtagctctcctccacccaacaatagcggcagtggcagcagcaggagtactggaatttggagttacagagctcacagctgttagatgtgtttggaaagttccttcttgagagtgtctggaagctttttctccctgtgtcttgtctgactttagtgaggctggagatctgggtgaatggcctccatcaacatcttccttcgcccacctctccagtagcagagtgcagataagactggacgggacagccctgctgaacccacggcagacctccaaagaggtctgtataagctggcgatgtcactgactttggcaaatgggctcagagaagatgctttcttactcaaggtgtcttctgggtgtttggaacagaggcttcctttcaggagtccaggactgtactggaaggaagtgaccacaagatgacaccgttgatcttccagacactcccgctgttatgagggtgaggggggagcccttctctaattatccttcttttgctactttttccctctgccttagcttttcctttcctgcactctcctggggacttcaactcagtctttctgaggcaagtatggaggggaggacagggtggcccagcttcgtagagatcactacctgctcaaaccccaaacagaaaggagtcatttgcagcctggaggaggactctaccattccaagatattcagctgaacaccctagtagtgctagccggcagcagtggctcctgagacctccacaccagagtcccgcacacattcaaggtaagaaccccagagaggagcccagagcctgcggaatcagacaccgcctcctagcggtgatgtccaaccgaaaaggcgcgggactgcagtaaacctgggcgagcaaggtcgaggagagctctgtgccgggaccgcgaggcgatccagaccagatgggggacgaggggcgcgtatgaagcttgtagaagaggttgccggtgaagagcagcctgtgcgctgcacaccctgttacgcaattgagccgccgttggaacgcgtggagagaaagggtgcgcgaggccagggctcgaagaaacgcagcagagggcaaagggcgaggtccaacggcccagccccagcaggggactctcgagcttcgggattccgcctacccggtagcggctgtttagacccagaccggcccctgcgcgatatgagcaccgctcaggactgcagctgttgggcaccagcagccaggtctgcaggctccgcgaagcctggcccggaccgtagcttctgcaagcagtccaggtgtatcctggggtcactggagggcagagcctgctcagagcgagtacagaagcagcccaggtcttcccagcaccaggttcactggaagtgccaggtgtgggagagggagctggggagggaagagggctatgctggttcccgagctgaatgatgtacccaagaggccaggtagctgcagcaggtgctaagatgaggaggagacgccatcatggggtgcaaatatggagcacaaaaggctggaccctcatccttttaggcagctgctgctgaagacatctgtttcccctctcccctcctcaggccaccacctccttcatgctcctctgtgatcacctctccaagtcccggtgtcaggagccttctctgtggccgccctggagagacttgagcctgggacgtgacgtgctgggctgtgaagctttctgagaagggaaacctgtggcctgacctgcctgaatgctgcacccaacctcatctcttcctgggaggcaggctctcttcgcttgtttttacaaatttggtaaaacagcatttcagtcctagtccctggtagtgaccctgccaggatttgacccaggctgtctgactctatttatgcacaaatcacgtattaccattttttattgtccttagtccatggcacacatataatgagcacttacgtggcccactaggaagtctttcctttttgcttcaaactcagatcttggccattggccacaatggggccttggtctcctctgaagatgacctgggactgctgttcacaagcaaatccccattgggcatttctattctcattgagcttgcagcaaaccatgaaggtccctgtggcctatcttctcccaaagccaaggatgggagatggtacatcaggtgggcacaggattcatgctgatttaaaagctttatggcagggcacagtggctcctgcctataatctcaacactgggaggctgaagcaggagaaatgctggagaccaggagtatgcaaccagcctgagcaacacagtgagaccctgtctctacaaaaaaattttaaaataaaattagctgggcatggtggcatacgcctatagtcccagctactcaggaggctgaggtgggaggatcacttgagcccaggagtatgaggttatagtgatctatgatcacacaactgcactacagcctggacaacagagcgagaccctgtcttgtttgttttgttttatttttgagatggagtcttaccctgtcgcacaggctggagtgcagtggtacgatcattgcaacctctgcctcctgggttcaagcaatcgtcctgcctcagcctcccaagtagctgggattacaggcgcccaccagcacgcccggctaatttttgtatttttagtagagacggggtttcaccatgttgtccaggctggtcttgaactcctgacctcaggtgatccacccacctcggcctcccaaaatgctgggattacaggtgtgagccactgcacctgggcctgtctcattttttagaaagacttttcaggatcctggtcaatattgacaatttatcaatattgacttttccagtacaggagcatgatatatgtctccatatatttaggtcttttaagatttaagattttctctcaacaatattttgtagcaaggtcaacaagctaattggcccctgaactatttttgtaaggccagtgactaagtacagtgttaacatttttggccgggtgcagtgcctcatgcctgtaatcccagcactttgggaggccgaggagggtggatcaactgaggtcaggtgttcaagaccagcctggccaacatgatgaaagcccatctctactaaaaatacaaaaaattagctgggtgtggtggcaggcgcctgtaattccagctactcgagaggctgaggcaggagaattgcttgaactgggaggcagaggttatagtgagctgagatcatgccactgcactccagcccgggcaacaagagcgaaactctgtctcaaggaaaaagaaaaaattaagggtctaaaaatataagaacgagactaagtggaaaagaccataagcaacccataacgccatatttactatctgggtttttaagagaaaatttgtaaccactgttttgtagttttctgtgagtctaacttgcagagcttttgctaatttattcctatgtattttatgtgagttgtaaacactactgtaaatggtatcattccaattttagttttcaatcattcatcaatggtatacagaaatttttaaaaatacacattgacttgtatactgagaccttggtaaattcacttttgacttctggtagcttcttcgttttctatgaatcatgtttatgtgaataaagctactttaacttctgttttaatctgcatgcctttttctttctctttcttacctttacatttgcagaaaccaacaactgtcagcattgacaccatcaggcctttctcttctaatttaaccttgcagccaaccacacggctatctgtgcgggatctctccccaagctcaaggacatgagatgcggatcaggtaggtgcaagatccatgctgtcttaaaaagtcttataaggccaatatgtcttggagcaattccatacaccaggggtccccaacacccaggccacagaccagtactggctgtggcctgttaggaactgggtcacacagcaggaggtgagtggcaggtgagcggatattaccgcctaagctccgcctcctgtcagatcagcagcggcattagatgctcttaggagtgcgaaccctattgtgaactgcgcatgcaagggatctaggtttcacattccttatgagaatctaatgtctgagaatagtttcattccaaaaccatccccccgctacccatggaaaaatttttttccacgaaaccagtttctggtgccaaaaaggttggggactgctgccctagaccagctttctggattctggctgaaacggacaacttaccaatattaattcttcactccaccagctgatacacacacacacacacacacacacacacacacacacacacacatttgtacgtgtattagtatacggcagtttacagaaaaataattgttttatatatattgatcttgtatactagcaccttgcaaaattcataccttactttttataattttttatagatggattataggattttctgcatacacaatcaggatttctgtgcattgagtagtttaccctttccttttaaatctgtatgattttaatttttcttatcctccacatttgctgcaacctccaatacaacattgaatccaagagaagtcaatggacttcattttctacttcctgatcttggggggaaaatattcagtatgctgttaactgaagttttttttcgttcaatgcatgcattatcacataaaagaaataaggaaattccgtccacttcctactttactgaaagattttttttgaaaggaatattagcttttttcgattagtttgttcacaactattgagatgaattgtatcggctgattcttttctaatagcttttttgagagacaattcatgtaaaatacaatccatgtatttgaagtatagaattcaatggctattagtctattcacagaaatgtgcaaccatcaacacaattttgtaaagtattcatcaccccaaaaagaatctttgtacaccttagccatcaccttctaatacccccacacctcccagttctaggcaagcattaatcgactttctctctttgagtttacctactctggacatttcctgtatgaaaccatagactatgtggttctttctggctggattcattcatgtattataatagttttatatggcatatacataacacaaaatttaccattttaacaatttctaaatgtacaattcactggcatttagtacatttatattgttgtataaccatcgccactattcatctccagaactttttcatcatcctaaattgaaactctgtacctattaaacaataactccccagcacacattccccacagctctggtaaccactattctgtctctatgaatttgcctattccaggtatatcatataagtagaatgacacctttgtccttctatgtccaggttgttttacctggcatagttttttttcaggttttatccatattgtagcatgtattagaatttccttccttttgaggctgaataatatgccattgtatgttttgtttccccattcctacattgctggatacctgggttgcttccagcttttggctattgtggatgattccactatgaacatggggtactactgggaaatagagtagaatgaacctgacatttattcaacaacacagacacatctcaaaaccattatgcttatcaaatacccacacccaaaactgcatactctgattctgtgtataacaaattttagaaatagcaagattaatatgaaatgtcagaaagcggataaatggttgtttgtggttagatatgcggaggaactaacaacaaaggagcataaggggattttttaggatgatggaaatgatctgtacctgaattgtggtggggccttgagtgtacacatttgttaaaacttagcgaacataaaacaggtgcatttttcatgtaaattttacctccaaaaggtttatccgaaaaaaaacatttgatgcaaaggcagtcacaacgtcatgctaacgtcgttgattgttttataggcaactgctattgcagttgacgatatgaaattgacgataattagggcagagatagactatgtggttctttgtggctgggctcacttacgtagcgtaatggttttatattgtgtataaacaacataaaatttaccattttaacaatttttaaatgcacaattcactggcaataagtacatttatattgatgtacaattattgccactctccatctccaaaacttttgttcataactgctatggtagtttgtaatatattttagacaattcatttagaaaagattaatgctaaggaaggggtatggtggataataggaaggcaagcagtgggggtgctgggcagggggtaaggcaggaagaaagacaaagcagcaagtaagcttagatgcagagaaggcttgctgacatgcggaccttgtccgagcatctgttgcaacataccctgatgagaagttcatgtgcaatgaaactccaactcctgggacctatgtgtggaacactgggaccctgaccccgtcagatcagtcagatcccctttctccagagcagattggtcagcacagggagacaacagctcagatcttcgccctgtgagatcacttatgggaggggctgccccgaccccccacatctgactcccccatgctatagtttggtttgtttgacccctccaaatctcatgttgcaatgtgatccccagcgttagaggtggagcctgatggtaagtgtttgggtcatggggttggagcccccatgatgtcttggagctttcctcacagtgatgagtgagttctcactctattaagccctgcaagagctgattgttaaaaacagcctggcaccttcctcccctcctctctcgcttcttctcttgcctagtgatctttgcacatgccagctcctctttgccagcctaaggccctcaccagaagcagatcctggcatcatccttcttatacagcctgcaggactgtgagccaaagaaacctcttttctttataaattacccagcctcaggtattctttttatagcaacacaaaaatgaatgaaggcatccctctcttcaatgctgcaggaattgttttcattacaggtttgggctgctctataatttcatataaatgggagcatacattatgcactgttcttaagccttaaggagtctttcattcagcatcatgtttctgtgatccatccatgttgcctgttatcaggaattcattcactttgatatctgagtatgaatgcaccatggtttgtttttgctttctatataaatagacatctgaggtacttccaggttttacatattatgaataaggctgctgtgaacttttctggtgcaagtgattctgtgtccatgtgtttttatttctcttgggttaatacttaggaatgaaattgctcagtcagactagatatatgtgtagttttctgagaaaccatatgaacttttttccaaagtggttttacaattttatattctctccagaaatgaagaagagttccaggtactccatatgcctgccaacatttggatacctgggttggataccttttaaactttatccatttcggtggctgtgtagtggtgtattgttgttttaaattttcatttctctaatgacaaatgatgttgaatacttttacgtgtgcttgttttatgatacttctttataggagaattgttcaaatattttgcccatttattatgtggctgggcattttatagttgacctgtaggagttctttatagatcttgcacacttgtcctttgctagatatatgttttgccaataatttccccagtttatagcttatggcttgcctatttattttctgaattaaatacttttggggcaaaagttaatctcgtttatggtttccagataataaattttcttttgatgcaatctcatttctcagtatcttattttataatctttctattcttaaaaactcctttgtagcccaagggattaatcagggtctcttacattttgttctaagacgtttataattttttgaaaaccttgttttttgaatccatctggaatttgttttcataactgtctgaggtgaagacgtcagcatttctcccatacacacagccaatggtcttcgaactcaaccgcatgtttgaggaggagaaagaggaggaggagtccatccatcattcctctgttttctcccttcttattttttttgagacagggtcttgctatcacccaagctggagtgcagtggcacaatcatggctcactacaacttccacctcctgggctcaattgatcctcctgcctcagcctcctgagtagctggaactataggtgcatgccaccacgcccggctaatttttgtatttttttgtagagatggagttttgccatgtttcccagaatggtcttaaactcctgggctcaagcaatccaccccccttggcctcccaaaatgctgggattacaggcatgagccaccgcgcccaaacttcccttcttatttttggatgccatctgtgtgatttgtttccatagtccctgtgatcaagtattcattaatgagaaaaaatttccccctcccagaacagcaaattcctggaccctttctctcacacacactcccatcattcaattccacaacaatactttgatacatgtacacaatccaaagtgaatgtgcacaatccacttctcatgccccccactgctgttgtgtgtccaagccatcattaccctccaccttaggggctcagcctcctgactggtctctcagcctccgtgctcatccgagcaaccaaaatcatccgcttaaaatctacggcagatcatgctgtcctatgctttaagccctccagtcattcccatctctgaggatgtcatcactttataatgacaacctacaaggccctccctattttgtgtgtccccatccctttctgctctcctcgcccccactctctctcgtgctgaccgcagccccatcagcttactgactgccccacgaggatgccaggcatcctcccttcgatcctttgcagtggctacttctgctgtttccagtgttcttccctcacgtgtctgtgtgggtcacttgatgacccccttctagaccttgctcaaaactcaccttcctagtgaggttgtcctctcttccacgtgcacatggagacttctgcttctccttactccaagtgtcaaacctccacaggcaattttattcttcataacatgtgttaccagctaaactgccacatcatttatgtgtgattacgattgttgtttattttctccccccgccaactcgaatgtaagctctgctgacatttttgctgctacttataataggtcccagctcatcccagatgctcaataaatatggcaaattgacaaataaatgagtcaactgccttctgaatattactgattcatccacagggtttcacactattaaaaaccgaacactattgaaagctgaactcaccctacgaaaacaatgcatgtccatttgtctaaggcaagtggctacagtcaccctggtcatgtgtggcagttaatcgtctcacttccctcttctgctacttcctctccagccactctcagctcctctagaacgggagctcattgtctcgtctttgctttggccaaagaacccccggagcccctttacctctgttctagcacccattggattcttccttccaaggaagtacaagaatgtttctaaaagctacatatcatcatttcacttctttgctttcactcctttcgtgactttgcatactttcaggatgaccgacaagtgcccatcacgtacattaatttgtccgttatctggcccctgctgatcattacagccgtacaccccaggcttgacttcattctccagctgtacctgactaccttccttgtgtcccacaggctcacagcctctctggcttccttgacttttcacataatatttccttgatgtgaaaatagccccactctacctagaggcttcctcctgcttcttgaggtgcaattaaagttccttctctcccgtatttaatactatgtccttcttacctgctctccgatccctagcacaaagtcctatttaaatttttgatatgcatctgtctctcctactagaatgtaagttcttgtaggtcaagaaatgtctttgaaccctatctcaccagtgactagcacagtgtctagtgcaggttcatcactaagtaaatgtttaataaaataatacataagaagctggcagaaattcttgggttttccctctttcctccatctgaaggtggttttcctgggttataaaatgccttagaaattatagagttttcaacaatgaagtctagtttagattcagcctgactctatgatcagccatgggttgggtggagtgtcaacttttgcaacttgagattttagtggtttaaatagggacaaactgtatcttttcccacataggcccaatccaggtacttacttgaaaataatttatttttctttcatttttttcctttttgagagggagtttcgctcttgttgcccagactgtagtgcggtggcgcgatctcggctctctgcaacctctgcctcccgggttcaagcaattctcctgcctcagactcctgagtaggtggaattacagtcacccaccaccacacccagctaattttttgtatttttagtagagatggggtttcaccatgttggccaggctggtctcaaactcctgacctcaggtgatacaccctccttggcctcccaaagtgctgggatcacaggcatgagctactgcgcccggcctcaaaataattttttgcaggactttttaaaggagtatgataacaacttttgagtcatatattttatcctagacttaaaatgtttcagtaattacccagtggcatgagctctttctttcattgttcttgcaggcccaagaggctggatgccaaacctatcctctccatgtgaagcaccaacttgggggtgtcaactaaaaatatgagacccgtaaacttggaaaggaagactttatttcttgagaagggttgcaaactgcaggctgggaagtggcacctccagctgagaccacaaacaggtactttgagggagatagggtgggataggagttttatgccaaacaggttggctaaacagacatattcaacaggtcacagggggaactatgaatattcatgaaagggggtcatatgtgtgcttgataagcaaacatatgtgttacatacatcccatgttcaccttcgagtggagaattaacattaaaatgcagtaaaattaggttctgtatgttaaaaggtgaaacacaggacatgaagacactttgtacacagcctcggtgaaccagccagaaccagcccatggttgaatactttgtagcctagtcagtttgtcacttcaaaactgcaaaaagggctgggagtcaggccgcatcagcaggcagttggttgaagtcagcggaggggtgttccattctttgtttttccagggcttgtttctgtttaatttgggaaacaaacaaaaaaaaaccctggtaacagtgaggaaggggtatacggaggcgcaatttcccatctccttacggccgggaaacttagtttttagttttttgggggtcaccttggccaagaggggtctgttcagtcagtcagagggctcagggttttattatttatttgtttgtttatttttctgagacggagtctcgctctgtcacccaggctggagtgcagtggcacggtcttggctcactgcaacctccacctccagggttcaagcaattctgcctcagcctcacgagcagctgggattataggcacatggcaccatgcccggctaatttttgtatttttgtagagatggggtttcaccatgttggccagactggtcttgaactcctgacctcaggtgatccaccccacctcggcctcccaaagtgctgggattacaagcgtgagccacctcaaccggcctctgggttttatttgtatttcacagtggaatgcctggccccaatctaatttaaaaaaaaaacacatagaaaagatattcaaacatttttaaaagacgaaaacagtaaagtgtgctttcctgtcacacagcagggaggatctgacctttggggaggtcagatggtgtaggggaagcacagagggaggtggcaagggcatgtcctggtctctctttctctggacctctcctcttcctgggctgatatcctcacactctcatcagagacatcagaagtcagcacaaacagtcctagagtgtgctacttccatgtcacattagctgagccacagaaaattttgaaatgtcaagtctggctcaacctgtcaccattcatagaaggcatccttccttctagactggcctaaaagtgaagaccccagagcagagactcatgaacatgaaggaggctttagatatttaatccggaaaagcaagtaaaaggaccatggagacaaataggttaaaagaaaaggaacagcttgcccgcagcggggtgggagttgctggaggtgctaccagtcccaagactagaaggaaagtgtcccagagcttgagtcttccaggcttacagacaaaaccagagtggagcacagttggtacttacaagtctctctttcctccccacagtggactttctcaaactggggtattgacctctgatgaaccgccatgcaaacccgtgcctttcaacataaaaagaagcccttcgaggtgctcaccttcaagcttgctagaggaggaggaagagcaggttgagtttgacataactagaatgggttgagcctttccagcagagtaaggttctttcatggtggacagtggccacccactgccatttctacaagaagattttgcttcttaggcactgagttcctggttctttcactagagaaaaatgagtaggttggcaatccagtacttccatcttctgtgaagacctgggcaggcaacgggggcttgggggcgggggcagggaccaaagacaaggctgccatttgctgtgcccaccacagagggacatttactccacctgaagcacaagtattttctcagtgatgttggctcctacaaagtcaaaaggggtaggctccctggcttacgctccaggagtttggactgaaagggacactaaaagtgtcttcctctaagtttatgatgttgccctcctctggctacaacagtgctctggccataagcatcccaggttctctgaatgatggtgggtatggaaatgttcccaaacacaggtatggcggtgtcccctcccactgtaccaatctatgcccagggctggaaggtccgtggtgctctgaactggattcataaacagtagcatctccaaccacaagtgtggtgtcaggccctccaacagtagcacatgtgctcccgtgggtgcctgatagaaagtgggaacatgtgtttattagccaggtgggccccaaatgctctgacgaggtgcagaaagaggactctttgtcacagttgtgctgtgccctcccattgcaacacatgtgctctgaacaggtggagcccaggtgctttgcatgtaggcggacacaagagggcctctaagcacaagtgtggtgttggaaccctcaaggctaccgatgcattctggccaggtgtgtcccaggtggtctgactatagacagcaacagaattatctccagcaccgttatagagatacccgtccaactgatgtgctctagcgggatgggacccgggtgatccgaacacaaggaggaacagaagtttattctgatatatgctccttcttagcgatgttatctccttcaatagtaacaggtatgctttggctgggtgggcctcagtcactctgtagccaggaaggaaagggctcccaaaacagatttctgctccgtagagctgatcttccctcattgcaacagggatgctataggcaggcaggacctggtgctcaggtctaagcccttcctagaataagttgtggttctgagtgttgtcagcccttctgcagatttcaatgacccctgacaaggagccagggtttgggacagacacaatgactgcaaacctgccaccacccaaaggggcttagatattgatggtgcatggcactgctgcagtggccctttatcttgatcccctttttttttgagacggagtttcgctctgtcgcccaggctggagtgcagtggcgcgatcttggctcactgcaagctccgcctccagggttcatgccattctcctgcctcaggcctccacctctcaggttcaagcgattctcccgcctccgcctctgcctcctgggttcaagcaaacctccgtctcctggatccaagtgattctcctgcctcagcctcccaagtagctgggactacaggtgtgcgcaaccacgcccagctaatttttgtatttttagtagagatggggtttcaccatg[132 bp omitted]cagatggcccatatagcgctcctgctattgaaggagcgcagatgtcgctcagatagcgacaggaagagaagtcagtttccccctgcaggtaggatcagtacttttcctaagtggctgcacttctttgaggtgcaagcatacagtgctgtctttctgagagccctggcatgacaccaaggggaggcccccttctgatgtaaacactgagcttgctgggttgcataaggcctctcaggggtgatataaaccgagggggtaaaggtgaccgtgttgctcccaggaactgttttcagaagatgcacaggtgcagcaggaggattcctgccagaagcaggaacagagagggcagggagaaaaaggaggatggtggcctgggggccaggcggggtgaggcttactgaggaagttgtccgtgaagagcagtttgtgtgctgtctgacactgagagtctagtaagaaatttggagaggtctcctagctgcatgttcctccaaggcaaaccatgctggatgtttgtgacatgtcattggaacacacaccagagaaagtgtgtgctagagcagagagggaagacaaggcaccaaaggacaaaggggaatcccagcaggacttttgagagcttgagacagctcatgctctttgcaggtgcttggcaccaggtgtgcccgatgacatggaaaagcatccaggactgtgtattataggaccccacataactgtcacccccagatcaccaggtctgcaggctcctcagcatctaacctaggggcagcaactagtgcctgtgagtctcctagcccttttctctggggttattggaggtcagaggtcagagcgccctagatcctgccaggaaggggccctggctcacaggaggtcagggtaggagaggtgggggtgtggccagcagggatcaactctgtctcatgccattactggtgcacccaggtggcccagcagggctgcagctgcaagacacgtgctctgatggggaggagagaccaagcagtgtggggcgtgatttgccctgacctcttcctttcaggcaacctctgcagaggacactagtttacccccacaatgtccccttcccatgtggtagctcagggttaccacacactgtttcctccagggatccctctagggcctctcaagtcttggagcaggcatatcttctctgtggccacccaggaaggtgtgggtccatgggcatgagatgtgagtccagctgggctgtgaaggtttctgagatgggtacttggcaccccaattttcccaggtcctgcaccccataccatcccttccaggcaagcagatcttccctcttttaacaaatttttcgaattgcaaacagcatttaggactttgcgccttcctcaggtcacccatgtgggcgtaagggagagtcaggatttgaactcagactgtctgattccagagtttatccattgaccacctgacagtggtgatgcctcatcatgtgtgtcacgtatttacatttttaaatagtccttagggtacttagcaccatgtacacctgtcatgagagtgttcactgcctgcatcagaagatgcagggtggagagcaccaattgtcagcacaaccatattgggcatttctctgctaaatgagtcttgcacaaaccacacagctgtctgtgaactatcttctcccaggtacaggacaggagaccacttaggtgcaagatacactctgtcttaagagccttatgctccaaggacaccaacatctcttgtgacaattccatagacctactttttaggatcctggctgaaattggcaatttactgatatcaaatagtgtactctatcaggatggtaaatagttccttatatttagaactcttttttttttttggacagagtttcactcttgttgcccaggctggagtgcaatagtgcaatctcagctccctatagcctccacctcccgggttcaagtgattatcctgcctcagcctctcgagtagctgggactacaggcatgcaccactatgcccagctaattttgtatttttagtagacactgggtttcaccacgttggtcaggctggtctcgaactcctgacctcaggtgatccacctacctcagcttcccaaaagcgtgagccaccgcgcccggcctttagaatgctttaattttctctcagagactattttgtggttgggaatgacaaattacagttcatgagctgaattctttccagtctgtttctgtaatgccaataaccttagaatggtgataagagttttcaaagtttgtagaaaagaggaaaggaaaaaaggaagaaaaacagaggaaaatatgcaacagagaccatatgcaatcttcagagcctataatatctactatctggtcctttacagaaaaatttgcctcttttgtgattttcagtgtataagtcttgtacagtatttactaatttatccttatgtgttttataagttttttgtatgctatcgtaaatggtatcttttacattttagttttcagtattcaccactggaaaatacagttgatttttatatattcaccttgtatgctagaactttgctaaattcactctttacttttaatagtttctttgtgaattccttaggatattctatgttcacagtcatgttttctatgaacaaagagagttttgcttcttcctttttatcctgtatgccttttatttttatttcttacccttatatttgctacaacctccagtaaaatgttgagaaaaagtagagatgtagacatagtttgccagtccctgatcttaggggaaaagtattcaacacggaattgagtcaaagtttgtggcatatgcacttaatcactcaaaagacatatcctctaattcctagtttgctaaaagatgtaagattgtgttaatttctttgcccattttgttaatttcttttagttcccacatctgagggagaacatgtagtatttatctttctgtgcctgacttatttcgcttaacacaatgttctccaggctcatccatttgccacaaatgacatggttttatttttttaacgactgaatagtattccattgtgtatacataatgcattttctttatccattatctgttggtggacatttagattgattccatatcttagctattgtgataagtgcttcaataaagataggggtgctaaccaagcacacaggcttaattagcttgacaattcttacacaaagtagagatttccgaaagacaccacattcattgagtaaattaggaaaactaaaacctgcctggcaagaatgatgaagaggcatatctgtggaggctttggatcttggtggaaaaaattaaaaggaaagaaatctctcccttgaaattcttaaccaaagtctctaccttctggagttagacatcatattatccaaacaattccatatcaatcattttgtgtaaagtagtactgagttggtagtggccccatatattacatctatacccacaaaagaattttttaaggacacatgggtacctctgtcacttgtcatctggttctcagtgttgacatggagcaatttgtaatctaaaaaacctgcagtcttatctaacaatactcaggtcctagggaaatatttctccatatctcttgcaatgagcctggtgtggtggtgcacctgtagtcccagatacagagatgaaaggatcacttgagcccaggagtttgaatccagcctgggcaacatagaaagaccctatctcttaaaaaaaaaaaaaggcaatgaaagaaattgaaaaggaaacaaacaagtgtcaagacatcccatgctcatgtattggaataattaataatgttaaaattagcatactacccaaagcaatctatagaatcaatgcaatccctatcaaaatatcaatgacatttttcacagaaacagaaaaagaattctaaaattcatatagaaccaaaatatcccaaatagccaaagcaatgctgagcaaaaatgacaaatgtagaggcatcacatttcctaacttcaaaatatacaacaaagctatagaaaccaaaacagagtggcattggtatgaaaggggaaacatagactaatggaacacaatagagaacccagacataaatccgtatatttacaaccaactgatttttgacaaagtgccaagaacatacattggggaaaggacaatgtcctcaataaatggtgctgggaaaactgaatatccgtatgcagaagaatgaaaccagatgcctatttctcaccacacaaaaaatcaactaaaaatggattaaaggctgtaagacccaaactagaaaaccactaaaagaaaacataggagaaatgctttaggacattagtttaggcaaagatttcatggctaagacttcaaaagcacaggcaacaaacatatagacaagtggcaatatattaaaccgaaaagttcctgcccagaaaagtaaacaatcagcagagtgaggagacagcctgtagaataggagaaaatctttgcaaactattcatctgacaagagacatatccagagtatacaaggaacacaaacaactcaacagcaaaaactcaaatcatccaactaaaaggtggtctataaattgaatagatatttctgaaaagaagatatacaaatgaccaacaggtatatgaaaaatgctcaatatcgctaatcatcagggaaatgaaaatcaaaagcacaatgaaatgtcatctcaccctggttagaatggctgaaagaaagaaaaaataaatgctggtgatgctgcagagaaaagagaaatctttttttttgttttttgagacggagtctcactctattgcccagggtggagtacaatgatgtgaactcagctcacagcaacccctgcctcctgggttcaagtgattatcctgcctcagcctcctgagtagctgggattacaggtgtctgccaccacacccagctatttttgtgtgtgtgtattttagtagagatggggtttcaccatgttggccaggctggtcttgaactcctgacctcaagtgacctgccctagtcggcctcccaaagtgctgggattacaggagtgagccaccatgcccagccagagaaaaggaaactcttatacactgttggtggaatgtaaattagtacagccatttactaatacagtatggaggtttctaaaaaaaaaataaaaatagaattactatatgatccaggtatcccaccactagatatttgtctaaagaaatggaaatcactgtataaaagggatacctgggaggggttccaagatggccgaataggaacagctccagtctacagctcccagggtgagcgatgcagaagacgggtgatttctgcatttccaactgagctttgaagagagtagtggttctcccagtacggagtttgagatgtcagaatggacagactgcctcctcaaatgggtccttgacccccgagtagcctaactgggaggcacctcccagtaggggctgactgatacctcatatggcccagtgcccctctgagatgaagcttccaggaggaacgatcagacagcaacatttgccgttctgcaatatttgctgttctgcagcctccactggtggacctgcagcaaactccaacagacctgcagctgaggtcctgactgttagaaggaaaactaacaaacagaaaggacatccacaccaaaaccccatctgaacgtcaccatcatcaaagaccaaagatagataaaaccacaaagatggggagaaaccagagcagaaaagctgaaaattctaaaaatcagagcgcttcctctccttcaaaggaatgcagctcctcgccagcgatggaatgaagctggacggagaatgactttgactagttgagagaggaaggcttcagacaagcagtaataacaaactcctccgagctaaaggaggaagtttgaacccatggcaaagaagctaaaaaccttcaaaaaagattagatgaatggctaactaggataaacagcgtagagaagaccttaaatgacctgatggagctgaaaactatggcatgagaactacgtgatgcatgcacaagcttcactagccgatttgatcaactggaagaaagggtgtcagtgattgaagatcaaatgaatgaaatgaagcgagaagagaagtttagagaaaatagagtaaaaagaaatgaacaaagcctccaagaaatataggactatgtgaaaagaccaaatctacgtctgattggtgtacctgaaagtgatggggagaatggaatcaagtggaaaacactcttcaggatattatcaaggagaacttccccaacctagcaaggcaggccaacattcaaattcaggaaatacagagaatgccacaaagatactcctcaagaagagcaactccaagacacataatcatcagattcaccaaagatgaaatgaaggaaaaaatgttaaggtcagccagagagaaaggtcgggttactcacaaagggaagcccatcagactaacagcagatctcttggcagaaactctacaagccagaagagagtggggaccaatatttgacattcttaaagaaaagaattttcaacccagaatttcatatccagccaaactaagcttcataagtgaaggagaaataaaatcctttacagacaagcaaatgctgagagattttgtcaccaccaggcctgccctacaagagctcctgaaggaagcactaaacatggaaaggaacaactgatatcagccaccgtgaaaacatgtcaaattgtaagaccattgatgctaggaagaaactgcatcaactaacgagcaaaataaccagctaacatcataatgacaggataaaattcacacataacaatattaaccttaaatgtaaatggctacagacacagattggcaaattggataaagagtcaagacccatcagtgtgctgtattcaggagacccatctcaggtgcagagacacacataggctcaaaacaaagggatggaggaagatctaccaagcaaatggaaaacaaaaaaaaagcaggggctgcaattctagtctctgataaaacagactttaaaccaacaaagatcaaaagagacaaagaaggccattacataatggtaaagggatcaattcaacaagaagagctaactatcctaaatatatatatgcacccaatacaggagcacccagattcacaaagcaagtccttagagacctacaaagagacttagactcccacacaataataatgggagactttaacaccccactgtcaacattagacagatcaatgagacggaaagttaaaaggatgtccaggaattgaattcagctctgcaccatgcggacctaatagacatctacagaactctccaccccaaatcaatgatatacattcttctcagcaccacaccacacctattccaaaactgaccacacagttggaagtgaagcactcctcagcaaatgtaaaagaacagaaattataacaaactgtctctcagaacacagtgcaatcaaactagaactcaggattaagatactcactcaaggaggagccaagatgcccgaataggaacagctcctgtctacagctccagtctacagctcccagcgtgagcgacgcagaagacgggtgatttctgcatttccagctgaggtaccgggttcatctcactagggagtgccagacagtgggcgcaggtcagtgggagcgagcaccatgcgcgagccgaagcagggcgaggcattgcctcacttgggaagcgcaaggggtcagggagttccctttctgagtcaaagaaaggggtgacggacggcacctggaaaatcgggtcactcctacccaaatactgcgcctttccgacgggcttaaaaaacggcgcaccacgagaatatatcccgcacctggctcggagggtcctacgcccacggagtctcgctgattgctagcacagcagtctgagatcaaactgcaaggcggcagcgaggctgggggaggggcgcccgccattgcccaggcttgattaggtaaacaaagcagccaggaagctcgaactgggtggagcccaccacagctcaaggaggcctgcctgcctcagtaggctccacctctgggggcagggcacagacaaacaaaaagacagcagtaacctctgcagacttaaatgtccctgtctgacagctttgaagagagcagtggttctcccagcatgcagctggagatctgagaacgggcagactgcctcctcaagtgggtccctgacccctgacccccgagcagcctaactcggaggcaccccctagcaggggcacactgacatctcacacggcagggtattccaacagacctgcagctgagggtcctctctgttagaaggaaaactaacaaacagaaaggacatccacaccaaaaacccatctgtacatcaccatcatcaaagaccaaaagtagataaaaccacaaagatggggaaaaaacagaacagaaaaactggaaactctaaaaagcagagcgcctctcctcctccaaaggaacgcaattcctcaccagcaacggaacaaagctggatggagaatgactttgacgagctgagagaagaaggtgtcagacgatcaaattaccctgagctaggggaagacattcaaaccaaaggcaaagaagttgaaaactttgaaaaaaatttagaagaatgtataactagaataactaatacagagaagtgcttaaaggagctgatggagctgaaaaccaaggctcaagaactacgtgaagaatgcagaagcctcaggagccgatgcgatcaactggaagaaagggtatcagcaatggaagatgaaatgaatgaaatgaagcgagaagggaagtttagagaaaaaagaataaaaagaaatgagcaaagcctccaagaaatatgggactatgtgaaaagaccaaatctacgtctgattggtgtacctgaaagtgatggggagaatggaaccaagttggaaaacactctgcaggatattatccaggagaacttccccaatctagcaaggcaggccaacgttcagattcaggaaatacagagaacgccacaaagatactcctcaagaagagcaactccaagacacataattgtcagattcaccaaagttgaaatgaaggaaaaaatgttaagggcagccagagagaaaggtcgggttaccctcaaagggaagcccatcagactaacagcggatctctcagcagaaaccctacaagccagaagagagtgggggccaatattcaacattcttaaaagaattttcaacgcagaatttcatatccagccaaactaggcttcataagtgaaggagaaataaaatactttacagacacgcaaatgctgagagattttgtcaccaccaggcctgccttacaagagctcctgaaggaagcactaaacatggaaaggaacaaccagtcccagccgctgcaaaatcatgccaaaatgtaaagaccatcgagactaggaagaaactgcatcaactaacgagcaaaataaccagctaacatcataatgacaggatcaaattcacacataataatattaactttaaatgtcaatgtactaaatgctccaattaaaagacacagactggcaaattggataaagagtcaagacccatcagtgtgctgtattcaggaaacccatctcatgtgcagagtcacacatcggctcaaaataaaaggatggaggaagatctaccaagccaatggaaaacaaaaaaaggcagggattgcaatcctagtctctgataaaacagactttaaaccaacaaaattcaaaagagacaaagaaggccattacataatggtaaagggatcaattcaacaagaagagctaactatcctaaatatatatgcacccagtataggagcaccaagattcataaagcaagtcctgagtgacctacaaagagacttagactcccacacattaataatgggagactttaacaccccactgtcaacattagacagatcaatgagacagaaagtcaagaaggatacccaggaattgaactcagctctgcaccaagcagacctaatagacatctacagaactctccaccccaaatcaacagaatatacatttttttcagcaccacaccacacctattccaaaattgaccacatagttggaagtaaagctctcctcagcaaatgtaaaagaacagaaattataacaaactatctctcagaccacagtgcaatcaaactagaactcaggattaagaatctcactcaaaaccgctcaactacatggaaactgaacaacctgctcctgaatgactactgggtacataatgaaatgaaggcagaaataaagatgttctttgaaaccaacgagaacaaagacacaacataccagaatctctgggatgcattcaaagcagtgtgtagagggaaatttatagcactaaatgcccacaagagaaagcaggaaagatccaaaattgacaccctaacatcacagttaaaagaactagaaaagcaagagcaaacacattcaaaagctagcagaaggcaagaaataactaaaatcagagcagaactgaaggaaatagagacacaaaaaacccttcaaaaaattaatgaatccaggagctggttttttgaaaggatgaacaaaagtgatagaccactagcaagactaataaagaaaaaaagagagatgaatcaaatagacgcaataaaaaatgataaaggggatatcaccaccgatcccacagaaatacaaactaccatcagagaatactacaaacacctctacgcaaataaactagaaaatctagaagaaatggataaattcctcgacacatacactctcccaagactaaaccaggaagaagttgaatctctgaatagaccaataacaggagctgaaattgtggcaataatcaatagcttaccaaccaaaaagagtccgggaccagatggattcacagccgaattctaccagaggtacaaggaggaactggtaccattccttctgaaactattccaatcaatagaaaaagaggaaatcctccctaactcattttatgaggccagcatcattctgataccaaagcctggcagagacacaatcaaaaaagagaattttagaccaatatccttgatgaacactgatgcaaaaatcctcaataaaatactggcaaaacgaatccagcagcacatcaaaaagcttatccaccatgatcaagtgggcttcatccctgggatgcaaggctggttcaatatacgcaaatcaataaatataatccagcatataaacagagccaaagacaaaaaccacatgattatctcaatagatgcagaaaaagcctttgacaaaattcaacaacccttcatgctaaaaactctcaataaattaggtattgatgggacgtattccaaaataataagagctatctatgacaaacccacagccaatatcatactgaatgggcaaaaactggaagcattccctttgaaaactggcacaagacagggatgctctctctcaccactcctattcaacatagtgttggaagttctggccagggcaattaggcaggagaaggaaataaagggtattcaattaggaaaagaggaagtcaaattgtccctgtttgcagacgacatgattgtatatctagaaaaccccattgtctcagcccaaaatctccttaagctgataagcaacttcagtaaagtctcaggatacaaaatcaatgtacaaaaatcacaagcattcttatacaccaacaacagacaaacagagagccaaatcatgagtgaactcccattcacaattgcttcaaagagaataaaatacctaggaatccaacttacaagggatgtgaaggacctcttcaaggagaactacaaaccactgctcaaggaaataaaagaggatacaaacaaacggaagaacattccatgctcatgggtaggaagaatcaatatcgtgaaaatggccatattgcccaaggtaatttacagattcaatgccatccccatcaagctaccaatgactttcttcacagaattggaaaaaactactttaaagttcatatggaaccaaaaaagagcccgcatcgccaagtcaatcctaagccaaaagaacaaagctggaggcatcacactacctgacttcaaactatactacaaggctacagtaaccaaaacagcatggtactggtaccaaaacagagatatagatcaatggaacagaacagagccctcagaaataacgccgcatatctacaactacctgatctttgacaaacctgagaaaaacaagcaatggggaaaggattccctatttaataaatggtgctggaaaaactggctagccatatgtagaaagctgaaactggatcccttccttacaccttatacaaaaatcaattcaagatggattaaagacttaaacgttagacctaaaaccataaaaaccctagaagaaaacctaggcattaccattcaggacataggcatgggcaaggacttcatgtctaaaacaccaaaagcaatggcaacaaaagccaaaattgacaaatgggatctaattaaactaaagatcttctgcacagcaaaagaaactaccatcacagtgaacaggcaacctacaaaatgggagaaaattttcgcaacctactcatctgacaaagggctaatatccagaatctacaatgaactcaaacaaatttacaagaaaaaaaacaaacaaccccatcaaaaagtgggcgaaggacatgaacagacacttctcaaaagaagacatttatgcagccaaaaaacccaggaaaatatgctcatcatcactagccatcagagaaatgcaaatcaaaaccacaatgagataccatctcacaccagttagaatggcaatcattaaaaagtcaggaaacaacaggtgctggagaggatgtggagaaataggaacacttttacactgttggtgggactgtaaactagttcaaccattgtggaagtcagtgtggccattcctcagggatctagaactagaaataccatttgacccagccatcccattactggatatatacccaaaggactataaatcatactattataaagacacatgcacatgtatgtttattgcggcactattcacaatagcaaagacttggaaccaacccaaatgtccaacaatgatagactggattaagaaaatgtggcacatatacaccatggaatactatgcagccataaaaaatgatgagttcatgtcctttgtagggacatggatgaaactggaaaccatcattctcagcaaactatcgcaaggacaaaacaccaaacaccgcatgttctcactcataggtgggaattgaacaatgagaacacatggacacaggaaggggaacatcacactccggggactgttgtggggtagggggaggggggagggatagcattaggagatatacctaatgctaaatgacgagttaatgggtgcagtacaccaacatgtcacatgtatacatatgtaacaaacctgcacattgtgcacatgtaccctaaaacgtaaagtataataacaaaaaaaaagacaggtgtaagaaattataaaagtattaattttgggaactgataaatgtccatgaaatcttcacaatttatgttcctctgctgcagttccagccagtccctccattcggggtccctgacttcccacaacaacacacttcatggggggacatagggtgaactactacacttcaccaaccagccaggacacattccacacatcaagctctgagagggatggcagatggtcatcctccaggtccagagctatgcccactggcaggacatcaccaggcaccgcatggaggtgatcagcaacttttcccagcagcacttcctcggggaggtggattaccttgtgtgtgcagatgtggacatgaagttcaacaaccatgtgggtgtggagatcctctcttccctgtttgccaccatccatcctggcttctatgggttccatcgggacacctttgcctatgaatgccagcctcagtcccaagcccattttcctgagggtgaaggggacttttattatataggggccttatttggtgggtcagtgctggaggtttacaggctgatcatggcctgtcaccaggtgatgatgattgaccaagccaaccacatcgaggccctgtggcatgacgaaagcctcttaaacaagtacctgcttaaccacaaacccactctcccttgagtacatgtgggattaaaaagtcgatggagtatacgttggatgaatacctggtgggtttgtgcaccatgataaactgcaagagatctgtggtcttggtaaataacaatgaggaaatgtgaactgatgagggaagcttccagaaagagaccagagagggggtgattgccagtcagcccgtatcttcctcctgaaatgctaccctgatttaaaatcagctttacaataaagagtatgactccacctattttcgtctggttataaaaaattgctaatgcctctcatcatctcctcaaatttaggaggccccagcacaaccccgctaccacaaccaccaccctatacacacatttaggcaggccttattccacagctcatgcacacgtttttcagtttcacccccttgagcttctcactgtgttctcctaaaacactcttcggggtggaggaggtgagtggtgtctgcccgtcctgacagataagggatctgtgatgagatcttttccagagcaaggaatcaggccccttaataaagaagagtaggctgggtgcagtgactcacgcttgtaattccagcactttgggaggtcaaggtgggtggatcacctgaggtcaggagtttgagaccagcgtggccaacacggcaaaacgctgtctttataaaaatacaaaaattggctgggtttgatggcgggcacctgtaatcccagctacttaggaggctgaggctgaagaattgcttgagcctgggaggcggacattgcagtgagccgagactgcgccactgcactccagcctgagcaccagagtgacactctggtctaaaaaataaaaacataaagaagagtagatttgtgatcttggcacagaatgactgtgtaatgcaaatccaatcagtgaggcatccagaaatggctcagagaggagcgatgtcccagcagcctgacccctccccctagtgtggtgtcctaaattgggttagtccatttgcattgctataaagaaatgcctgaggctgggtactttacaaagaaaaggtttacttggctcatgattctgcaggctgtgcaagcatggcaccagaatctgctctgcttctggtgaggtttcaagaagcttccaatcatggtggaaggcagaaggggagcaggtgtgtcacatggcaagagaaggagtgagagagtgaagggggaggacccaggctcttataaacaaccagctctctctcatgtgaactacgagtgagaactcatttttgtcatggggagggcaccaagccattcataaaagattcacccccatgacccaaaccctcccactaggcccagttccaacactgggggccacattgcaacatggatttggagggaacacacatccaaaccgtatcataaaagcagttttcacagaaagcatgtaactctgcctccttttcctatctgattgagaaaaaaaattctgaggcctcacaccacccccaaatttaggcaggcctaatacgatgccatcctctagtctcccaccaacaccaaacacacactttcacacaaataagaaacacacttttttttttttttgagatggagtctcgctctgtcgccaagctggagtgcagtggcgcgatcttggctcactgcaacctctgcctcctgggttcaagtgattctcctgcctcagcctccctcccgagtagctggaactacaggtgcgtgctaccatgcccagctaatttttgtacttttagtagagatggggtttcgccatgttggccaggatggtctcgatttcttgactttgtgatctgcccgcctcagcctcccaaagtgaagaaacacatttaggcagacctgacttctggactcaggctcaagttcctgagttgccaccaccttgagctttttaatgtgcattcccagcttccttcagggtggatgcagtgtgtggtctcagcccaacctgggatataaggaatcagagatgagatctattccagaacaaggaagagcctcctggacacagtctcctgcctcctgtgacagtcacacaagggcctgtctctgcccttggccaaactgatgcacaaaggtcttcagctctaaatcaaattacttcctcttgttagagtccttgtaaaagctgaaaggccgtttagtgtgcagaagaacgtgatgccaaataaaaccctctttcctggcactgaagttcttgtttatcccaaaatattgccagctgtccaccaggggcaaagcgggtctctctcactctccccccacccactgatggactccatgccacctccattgatcaatttagtaacttattaaggacttgccagctctttaaaaactgaaaaaaaatatatttctagatgcaaataagaatcaattcaaattattacaaaaacttgcctcttaaaaaatttgttcattgtccttcagcaaaggcctgaaatcctacatggcaggtatctgaaatccagcattttcttgtcttgctttcttttggacatatcaggacaaacagtttgtccatctttctgttaggttttgaa[131 bp omitted]gaaaccctgtctctactaaaaatacaaaaattatcaggacatggtggcacgcgcctgtagttccagctactcaggaggctgaggcaggagaatcgcttgaacctgggagatggaggttgcagcgagccaagattgtgccactgcactccagcctggcaacagagcgagactccatctcaaggaagaaagaaaggaagaaagaaagaaaggaagaaagaaaggaagaaagaaagaaagaaagagggagggagggagggagggagggagggagggaaggaaggaaggaagaagaaagaaagaaagagaaagaaaaagaaagaaaggaagaaagaaaaagaaagagaaagaaagaacgaaagaaagaaaagaaagaacgaaagaaagaaagaatggcgggcaggaaggagggagggaagcaaggaaggaaggaaggaaggaggagaaagacacagagagagagagagatggtggctctactgcaatgtaggttttatttggaggtgggggaccagcttaatgcgagggcgcactgctgcttacagctagtgcaattagatgcctgggtaggggtctgggggggtatggcttactacccaggaggatattgataagatgttcccataatgaggtggtttggccctttttctggcaggatgtgataatgaggtcccttggacttttttcccagcaagatgtgataagaaattcaggtggttagggcggggtgcagtggctcacgcctgtaatcccagcactttgagaggccgaggcgggcggatcacgaggtcaggagatcgaggccatcctggctaacctggtgaaaccccgtctctactaaaaatacaaaaattagccaggcgtggtggcgggcgcctgtagtctcagctactcaggaggctgaggcaagagaatggtgtgaacccgggaggcagagcttgcagtgagccgagatggcgccactgccctccagccattgctggaacacgaattaaaagaaattaaagaatgtgtaagcaaaaactcagctatatataaaaaaacccaattccccctgaggaggagaaagagctggagtccttcaaaattagctgcctgtttttccttctgtggctagtgagccttaactctccctttcccagacattgtgaagaccctgtttagctgtgcagctgcaaggtcactagacagataatcttaagtcttaatacatgtcgttccttgaaaagtaagaaataatgtaatgcatgtctcaattaaataactctctttgtttctggcttctgtaatatgcttccccctgcacagatctgcccccaccccacgaaatgcttaaaaggtagcttaactctttgttcagggctcagtcctttggatgttaatccgactaggtcagtgcacttaaataattaaataattcctcctcaacccctcggcctaattccttaattatcctgcagcagggtgacagagcgagactctgtctcaaaaaaaaaaaaaaaaaaagaaagtcaggtggttgggcagaatgtttctcacagcccgaacccctgtggaatgtttcactttgaccaaggtctgtgaaatggtggggggcttacaaaataatgcggtttggactaatgctttccttgtttttcacggccttggtagtcttcaagaggcctggccaggtggaatgccccccagtctgagtttgtctggtgcttccttaccatgagactggggtcttggagttttgaggttttggaaagacacctcagaagttaagtatctttcttgtcacattgcattaggggggtacatggtatcaatatctcttttctctggtgatgtaaaacttgatcatttgaataatgtagtctttcatggtttttttatccactgtaaagttgctatgtgttcctccctctactgtagtctttggaaaggagtcaccaagtcagcccacccttaaagagggagaatatttagtctccacctcccggaagaaggagcatccatatgtattatttgcaatttgtctgtaagataggtttgtctaccccattaaaaagtgggcaaaggatatgaacatacacttctcaaaaaaagacatacatatggccaacaaacatgggaaaaagagctcaacattactatcattaaagaattgcaaatcaaaaccacaatgagataccatctcatgccagtcagaatggcgattattaaaaagtcaagaaacaacaaatgctggcgaggttgcagagaaataggaatgcttttactctgttggtgggaatgtaaattagttcaaccattgtggaagacagtgtggcaatccctgtaagatttaggaccagaaataccatttgacccagcaatgccattactgcgtatatacccaaaggaatataaatcattctactgtaaagatacatgtatgcatacatatgttctttgcagcactatttgcagtagcaaagacatagaatcaatctaaatgctcatcaataatagactggataaagaaaatgtggtacatatataccatggaatactatgcagccatagaaaggaattagatcatgtcctttgcagggacatggatgaagctggaagccattattctcggcaaactaaggcaggaacagaaaaccaaacactgtatgttctcacttataagtagcagctgaacaacgagaacatatggacagggggaggggattaacacacactgggccctgtcaggggagggtgtgaggggagagcattagggaaaagagctaatgcatgctgggcttaatacctggatgatgggttgataggtgcaacaaaccaccctggcacacgtttatttatgtaacaaacctccacatcctgcacatgtaccccggaacttaaaaaataaataaaataattatttttaaaaagatatatttgcctcttcttggctgagtgtggtggctcatgcctgtaaatccagcactttgggaggccaaggcaggcggatcacttgagtccaggagtttaagaccagcctggccaacatggtgaaatcccatttctactaaaaatacaaaaattagccaggtgtggtggcttgcacctgtaatcccagctacttaggaagctgaggcatgagaatagtttgaacccaggaggtggagtttgcagtgagctgagatcgcgccactgcactccagcctgggcggcagagcgagactgtctcaaaaaaaaaaaaaaatttgtcctttctttcttgtttacttattcatttatttatttatatagttatggacttatgtgtcttattttaaactttgggtattaatccaataactttgggttattttggtgtgcatatctttccagcttgggccattaggagctcttcaaagaagatttctttctgtcagaggatttttgttttgttttgttttgtttgagacagggtctcaccttgttgcccaggctggagtacagtggcgtgatcttggctcactgcaacctccgcctcctgggttcaagcgattctcttgcatagcctctcaagtagctgggactacaggggcacatcactacgccaagctaatttttgtattttttgtagatatggggtttcaccatgttgcccaggctggtctcaaactcctgggctcaagcaatccacctgcctcggcctcccaaagtgctaggattacaagcgcacctgtcagagttttcagggacgtggatgaagctggaagccattattctatcttgtttgtgccatcacactcctctcctagggtagaaggtaaagttccacccttgagagagtttcaacagagccaagtttctggtctgtaggccctcaggtcccgtagtgacctctgggaagtgaggcgggggagggcagctgatcacagggggtccctcagagcctctggtgcaggtcgtgagtcacacacactccgctcgctggcatttctggacagcctctaaagctcaagcccacttagggtcatgttcgccaatggaaaaaggcgagactgccagaagggatgagactggctcccctaggaatcaagaactcccaagaatttgttcctttaagagtgagcagaaagttgctggcagaatttgacaactgaattgtggtaggtagaatggagcatgaccagccctggagtcaaccaatatggctgcaagtcctggaacttccctggcagtgatgggctcagaggccaaaagatagcatccacctggccttgaggcctgatgcggaggatgcagctggtaagatgttcagggggccctggtcaggcccacatcccccatactttcctccaggactcaaactaaggccaaagccagttttctctgaccggcctgttgtggtgtacacctgtccttgcctccccactgacttttagctccacattttgggtgagtcttgcatgggaagttagtacaggtgggagaaggatgtgaccaggatgcaaaggtgacagtcggggctgggaaaacataacgattttaatgtttctaaaacggagctgacagacaattcacaggacgaggaggtttcttcacagaaacccaaactcagatgctgcccctctctgggttcagccccagcatgccctcaagcacctcgcatctccttcctgccccagcccgggcaggcgctcattctcctgttactgggtcatgagggagccgtcctcatcctaatctgtctgacattagccccgtctccacactgggctggttctcactgaggtctgcacggaatgaccaaggagaagatttcatccttgcagatgaggagtgggtgatcctggggaatgggaaccctgctgtgggcccaggacttttgcaggagccctttggtcctcctagtcagactttctgatttagttttcaccaggctgattccagtaaaacaactgcaactcaactctcagagcccagggacggtgtcctgtgtgtggcgcgtgggaggcccagcaggagatcttgggacatggtgaggggttgtgacacgtgaggccattgagaacatgtggactggaattaggcagagccaggataggtctaggccctgccgctgactagctgtaggatcataggtaagccgttttatctttctgaagctctgtcctcatttgtaaaatgaggacccagctaaataacatacatgtcaccccaggattcatcagccttgggaggttacaatgacatcaacagccatagaaagcctttctctggctctgcctttattggagctgcagagtctgcaggccctggaaggcctggttgaaaagtgactctagaaatgacctgcatgagctcatcacaagcccttttaatttaatctcttcgtagcgtctgtgattttctgctattttcctgaggaggctgaaatttctgcaaagacgctctccatagatgctgagcatagaggcttcggttgcttctgcattctactactgggaccaggactcccacctagtcttggcccaggaggaaggaagaaagagagtggagggagaagctaacgtagagggagtgttggtgtcaggtacttgtaggatctgccacctggggcaaattacaagatgccactgagcctacttccaaatgcatcgaacagggccactttatctcccagcaggccagtcatggggctaaggtgtagagactaggttaggtgagttgtgtgtgactgaaagacagaaaccaggtttcacctgcacttttacagagagtagagcagtgccaggctccagtgagtatggcccacaaaaaagtgggaaaataagtagtgtctctattgtctgagtcttgctggcataattaggtctcatgcagagagttaaacttgggacttggggctaagaggcctgaggcttgagttccggccctcgtctgacctgctggacaaacccaggcattgtgcttcatttgtttactcattttaaagcttgattttacatctaccaagtgctgggcactctgctagacttaacattagatgtacatattatactgaaaggtacagcattttactgagaagtacaacatgaaatttgaacagatgaagaactaaattgcgctcttgtatggcgtgagtccaccttgtagggatgttaactcttcccagctcatctttgtttcaaaggaaattaatcaagtttatccaaaagaataaatgcttgaaatcagtcaagaaaacttagtgtctgggatttacatgaggaagaattcaaaggttgcgtggattagaaagggaggcatccagaatgatgaggaaatcaggagtagatgaaaatatctattatttggcaaccctaataaggtataataaatattaaagaaacaagtgacacagtttttacctgtcaaatttgaaaaataaaaatatattctgagcacataatttcataaagaagagtacatatatctccacactcacatactcttgtggggatgaaaataga[137 bp omitted]tggcgaaaccccatctctactaaaaatacaaaaaaaaaaaaaaaaaaaaaaaaaagctgggcacggtggcgggcgcctgtagtcccagctactcgggaggctgaagcaggagaatggcgtgaacccgggaggcggagcttgcagtgagccgagatcgccccactgcactcccgcctgggggacagagcaagactccgtctcaaaaaaaaaaaaaaaagaaagaaaaaagaaaaaagaaaagaaagtttttaccttatcattaaatagttatttcataaatacatcatttcaaaaattatctcataaataaatcctaagaaaataaacatagcaaaattaaaagaaacctacttaaaagtgaaataataagaatggtgggacgtatttgtagtcattgaaaataatgcttttgaagaccatttaaagatgtgaaacatgctaatgtaaaataaacataaaatgtaaaagacaaagtatgaaacttaatatttattttaatttaaaaattagaatacatatgtattgacaaaggtaaaacagatgaaactgtgagatcatctatggtagtgggattctggaaaattgttgttttccttttttttcaacctttttgtattttctcagttttaattgagcttgtgttacttttacagtttgaaaagaaaaagggggcggggagaaaaaaccaccaccggcaagacagtgggagggaaaaaaatcagtaatctatttttatgcagacaccaggcattttctgtttgaggttaattaccaagtttatttaactagaattccattctaatcaaatgttcatctgtgagaatgtcctgatatattttcttctgttttaatcttctgctagtgacatattataacaatgtatgtaagatactgaacaagaaagagaaaaaggcagtccttgggtttggtgcac[132 bp omitted]cggtgaaaccccgtctctactaaaaatacaaaaaaatggccgggtgtggtggcgagcacctgcctgtagtcccagctactcgggaggctgaggcaggagaatggcttgaacccgggaggcggagcttgcagtgagccgagatcgcgccactgcactccagcctaggcgacagagcaagactccctctcaaaaaaaaaaaaaaaaaaaaaatttaaaaaccaaattaattcaataggattttgtgctttgcgcttcccctggtctccacagaactgtgacacagcgtactgaggaaactctttgccttacactaaacctcacaggtcctgaacaatcaagagctttgagaagatacacaactctgacggcttctggagagagcatgtctctctttcccctgggctccatgccagcttgccagaatttttacaatttgttttcctcatttttctaattatgtttcctcctgaaagtgattatagatagaattcatttgtatttgtggagacttctttatcagatcagcaagttttcctttttttacgagttaatactttcatctttagggttctcagggaatacacagcatatgtcaaaacaaaaatgagatgaaaattcctaggtaattttttttttacttttattttaagttcatgggtacatatgcaggtttgttacatacgtaaactcgtgtcacgtgggtctgttgtacagattattttgtcacccaggtaccaagcctagtacccaattgttactttttctaatcctctccctcctgccaccctccaccttccaataggctccagtgtgtgttattcccctctttgtgtccgtgtgttctcatcatttagctaccacttataagtaagagcatgcggtatttggttttctgttcctgcattagtttgctaaggataatggcctccagctccatccatgttcccataaaggacacaatcttattcttttttgatgactgcgtggtatcccatattttccatcatatgtatcacattttatttatccagtctgccatcgatggacatttaggttgattccatttctttactactgtggagtgctgcaatgaatacatgtgtgcatgtgtctttatggtagaatgatttatatccctttgggtagatatccttactgggttatttatgcctaccaccaggcaaaaataaaataaagaaaagggcttcagacgttaaagacttatcaatagaccttttttatatgaatgtgtatggctgtgtgtgtgtctcaatatactgttgcactggagctgctgctggtttttttaaattcacaagcccctttcacatgaaaacagtgttatggttgggtttccacaaagatctattcatatctgaagtatatctctctattttaaaaacgtttttattgctaaataaggcacatacgccaagaagagaaggtgttcacgtatatgaacactttaaggaataatagacaatgaacacctgtgaatccaccatgcaggtgagctcacggtgcagagccccctggatccctcctcacctgcatgcagtcctggtccaccctcctgcctctattctgcactttttattagtcatccttgcttttcaaaatagtttaataatgattgcatggctccacctataatttacttttatttgcttttcaccattagaaaagcagaatcaggcagggcatggtggctcacatctgtattcccagcactttgggaggctgaggcgggtggatcactggagtccaggagttcaagaccagcctgggcaacatggtgaaatgacgtctctactaaaaatacaaaaattagccgggcatggtggcacaccacctgtaatcccagctacttaggagtctggagcacgagaaccgcttgaacctgggaggtggaggttacagtgagctgagatcaggccactgcactccagcctgggcaacagagcgagactccatctcaaaaaaaaaaaaaaagataagcagaatcatactgtatatattcacctggaaccttttcttttgctctacattatgcatcaatttgtcaacttggagtttattcattttaatgtctgcgtagtatttttttgtatttacaatttatttattcattatactgttcccaagttcttgacattataaacagaactgtttgctggacacacccaatttttaaaaacttttaatatattttgtttaaaaaatgttttaacttttaagttcagggatacatgtacagaatgtacaagtttggggtttgttgtaaagattattttatcacccaggtattaagtgatacccaatagttatttttcctggtcctttccctccacccaccctccaagctccaataggccccagtgtgtgttgttctactctatgtgtccatgtgttctcatcatttagctctcacttacaggtgagaacatcagtattttgttttctgtttctgcattagtttgctaaagatatggcctccagctccatctatgtcccttcaaaggacttgatcttgttcctttttacagctgcatagtattccatggtatatatgtaccacatatgctttatccagtctatcattgatgggcatttgggttgattccatgtctttgctattgtgaatagtgatgcaatgaacatacacatgcatgtgtctttctttatagtaggacaacttacattcctttgggtatatacccagtaatgggactgctgggtcaaatggaatctccacaccatcttccaaaatggttgaactaatttacactctcaccaacagtgtataagtgttcctttttctctacaacctcactagcatctgttagtttttgactttttaataatagccattttgactggtgtgagatggcatctcattgtggagacacccagtttatccagggtttagaattgtagaagttaaattttctcattgtacaatatgtgcatattcagctttattaggcaatgttaaatgattgaattatccagcttttaaatttctgccacctaacagctcattctggttttaatttgcttgacttgcattaaataataaagttagatatcttttttatatttaatggctggtgttgtttggctgtgcctgacccaaatctcatcttgaattgtagctcccgtaatccccacatatcatgggagggacctggtgggaggtaattgaatcatgaaggtgggtttttcccatgtttctcttgtggtagtgaataaatctcatgcgatctcatggttttataaagggcagttcccctgcacatgctctgttgcctgctgcaatgtaaagatgtgcctttgctcctccttcaacttctgccatgattgtgaggcctccccagccatgttggaactgtgagtccattaaacttctttttctttataaattacctagtctgtagtatttcttcatagcagtatgaaaatggagtaatacaatggctacttgagttttcctttctgtgaaatgcctaatagcatatatttccccacatttctattggcctatgtttaattttcttattgaatcattagtgttctttacatgagtccttttcagttatatatgatgcagatatcttcttccagttggggtgtatgtttcatgctctttgtgacatctttgattaacaaagtccttgaatttagctgtgttttcctttggggcttacgcttattgcattgtctttaaacattcttctttaccttgaaatcataaactattttcctatattttcttttaattgaattgttcttttcctttttttgagacaaagtctcactgtgtcacccaggctggagtgcagtgatgcgatcttagctcactgcaacctctgcctcccgagttcaagcaattctccttcctcagcctcctgagtagctgggattacaggtgtgcgtcaccacgcccagctgatttttgtatttttagtagagacagggttttaccatgttgaccaggctggtcttgaactcctggcctcaagtgattctaattgaatttttaatataagctgaagttagggatttgttttcatttttttcagtatcatagccaatcaattattcaagcatgctttattgattgggccatcttttctcagctaatctgtgttgcctcctcagtcatgtgtcagattcccatacatgaatatattactccctcacctttaggttagctcctgctggaagtctgatagatgtatattgaacttcttgacctaccctctgatctcataaacttaataccttacttccaaactaaccctattagataagtacattttctattatattcaataattcaagcatgttcagtccagctagtcagattgtatattttgtgtgtctgggcatgtgtgttttctgttgtatttccatcatgataatttatttcctcatgtgttttgtaattttttaaactgtgagaccatgatccttaatctttcagaaaataactggttttccatttgccagggacctagccatgcctgttcctgtgtgtaaaagtacactggagtgtaaaagtacactggagaactgtattcctgggtctaaattgtaaaagtaataaattgaacaaaaacacaattcaatgaaatatgtcttttcctcctaccttgataaatattttttcataatgacaaaatagaaacaaattcgaaaatccatggattttataggactagaagttgtccaaaaaaaatcaaagatgaggaaatttcattattgttattatgcatgcctatgtgttctcttgataggctggtgaagtttgggttcattattgtgaaaataagtaaaagggaaactaacacaggcctattgtaaactaacactagctcaggaatgtgtgtatgtgcaagagcagctatgctagtcaaagatatgtgttgcaacctcccatagagagacacgtgtcagcttcaatcccaaggcctataaactaaagttgaccacttcctgtgtacctagagtctgttaaatatttcattgatgggtactggttgtaaacttgtttatcagatgtaaaacaaggtaagataatatcaattatccttccaccaggccctaagttgcctccatctcctacccactcaaccacacatttgctttactttacgtataacctctctaaacaccgatccaaatcacaggaatgtaatggttacttcactgcccaccctctgtaccacagtatcccccattaaaaaaaatatatgttaatactgcgctttatgtaattgactttggaactcagttacagactgctgtaatcctggcttccccgatgtgcactctcaagctccaggttagtaaacctcattagattgtgatccctgtctcagtccctcatttgggttgacattaccaaaaatttattttattagtctatatttactctacaaaatttatttttcttgccttcattttaacaaaatcagtaaatatgttataatcgtggttttgcacatcatctgttctattaaaaataacaagctaaaataggaaaatgaaatgtaattaacagtgatatcagcaaaatagtggagtaggcagctacaaactttcatcctcccacggaaacataaataaaaagcagggccaggcatggtggctcatgcttgtaatcccagtactttgggaggctgagctgggaggattgctttaggccaagcgtttgagatcagcctgggcaacatagcaggaccccatctctacaaacagacaaacaaaaaccagcagaaattattaggaacaactttgctagaactctggaaaaccatcaaaggtttacaccaaccaagaagatgctgaatcaagaaaaagttaagttaaagtggtaggaaagctttgtgcattcttactggcctttgccccacacacttttcagctcagtggcagttctgaagacttcagttcgcattcccaccataggatcctgttccctggttccagagggagcagagcagaccttactcacaaattatcgtgtattgctgtgctagcctgcttaggggacacatgaaggaccaatgcaaagtgttcatttccaattaatctaacttcaagtcacacaggctggaaaagtgacagacattgcttgaaaatattgtaatgcaaacaacctgaagtcgtgtagggcaaaagttatggttgaaagaaacaatagaccacctaagccagagaggaagagtaggaagagagttgttctgggaaattacggcattaaaagcacccttaaatatggctaaatttagaaaattccatgcatgttcaaggcaagacacatgttcagaaagacctgaaaagacagacccttagctttcaccttgggctggtccctaggctcaataaaagccttgctaagtgttgatgaaggccatagcacagagccatctgaaaatactggaagagatagcttcttcttccctcatctgttttttgtttctttgtttgtttgtttattgccctgccccaatgcctttctctctgacagccagctgtcagtctggctggattgaggaatacctagaaattgggtaaagcattattttgggtgtgtctgtgagggtgtttccacaggagattaccatgtgagtctgaatggactaggtggggaagattcatcctcaatgtgggtgggcaccatccaatttgcttggggtctggagagaacaaaaccagagaaaaggtgaatgtgtcaatctatctgtgcgaactgggatacactcttcctctgctgtccctggacaacaactctaggctccccagcctttggactccaggacttacaccagtgattcctgggttctcaggtctttggcctcaaactgagagttacaccatcagcttccctggttctgagacgtttagacttggactgggccatgctacaagcatcctcgggtctccagcttgcagatgtcctgtctcaggacttctcagcttctataattacatgagccaatccccctaataaatcccctctcatatgtctgtgtctctatcaatatatcctatttattctgtctccctggagaatcctaatacactttatctttctctcttttttgcccctggcattcaaggaatactcggtcaaaacagtagctgaacacaagctaaggaagagagacatcagttgtgacacataacaagaaaaacagtctatgcaaaagtagttgcagaaagtcagtaaacaattgaactactatagcttccaataattaaaataaatcaacaaaccctgggtaaggtgaaaatatgatttccagaattatcatactgtcactttcaaatggcccattcaaagggaaaaaataaattgacagaaactattcctcaggaagctcagatattggacttatgagacaaagactttgaaacaaccattttaaatatggtcaaagagtgaaagaaaaacatggacaaagaattaaggaaatcagaaaaatgatgtttgagtaagttgtgaatatcaataaagagatagaaattacaaaaaggaaccaaaaaattctgaagctgacaagtacaataattacagtgaaaaactcactattggggttcaacagtagatttgagcaggcagaagacagattcagtgaacatgaacacaaaacaatgaaaagtatctagtctgaggagcaggaaaaaaaaatgaagtgaaaaaaaacataagacctgcaggacaccattaggcacgttaacatatgcagtaagggattcccagaagcaagagagaaaaagaggaagaaataacatttgaagaaagaatgcctgaaagcttcccaaatttgatgaaatacatgaatctacgatcaatgtgttagtccattctaacgctgctatgaagaaatacccaacactgagtaatttataaaggatggaggtttaattgtctcacagttctgcatggctgggaagacctcaggaaacttacaatcatggcggaaggggaagcaaacacatacttattcacaaggcagcaggagagagaagtgtcaagcaaaggggaaaaagtcccttataaaaccatcagatctggtgaaaacttgctcactattttaagaacagcagcataagggtaactgcccccataactcaattacctcccactgggttcctcccatgacacatggggataacaggaattacaattcaagatgagatttgggtggggacacaccaatcaacaaactccacatagaataaactgaaagagatacacattgaaatacattacaatcaaactgttgaaagacaagcacaaattctcttaaaagcaacaagagggaagcaacttatcatgtacaaaggatactcgatctcacttttgcccaggctggagtgcagtggcatgatcatgactcactgtatccttgacctcctgggctcaagcaatcctccaacctcagcctcctgagtagttgggactacaggtgcatgccaccatgcctggctaatttttaaattattattattatttctgcagagatgagtttcagtatgctgcccaggctggtcttgaactcctgagctcaagcaatcctcctgcctttgcctctcaaagtgctgggattacaggcatgggccaccatgcccacccaacaaccagtttctcattggaaaccataaaagccagaggtattaggttgctaaaagaaaaagattaactgtcaaccaagaattctatatctggcaaaacagtccttcaaaaatgaggcagaaattaagatattcccaggtaaacaaaatctgaaggagtttgttccctacaggagactctaaaatgggcctttcaaattgaagagaaagagcattcattagacagtaacacgaggccatagaaagaaacaaagatgtctggtaatgataactacacaagcaaatataggagccagtgttgctgtgcgtttggcttgtaaattcactttttcttacataatttaagagatgagtacataaaaattataagtgtatattactggacacacaatatataaggaggtaatctgtgacaagataaagggggaggagctgtataggattagatactttatatgccacttaagttaacttgcaataatttcaaactacattgttataggatgttaaatataattcccatggaaaccacaaggaagtatctttaaaaatatacataaggtcataaagagggaatcaaaaacatttattatgaaatatcagttaaacacaaaaaaggcagtagtggaggaaaagaataaaaaaggcataagatatacagaaaacaaataaaatggttgaagttctaccttatcagtaattacttaaaatgtaaatgaattaaactctccaataaacatgtggatattggcataatagatgaaaaccaagacccaatgatatgctgtctaaacaagacttgtttagatccaaagacacatataggttgaaagtgaaaggatgggaaatattatccaataaaaataatgaccaaacaagagctaaagtggctatactaatattggacttaaagttaaaaactattaaaagggccaggcctggtggctcatgcctgtaatcctagcactttgggaggccgaggcgagtggatcatgaggtcaggagttcgagaccatcttggccaacacggtgaaaccctgtttctaccaaaaatacaaaaattagctgggcgtggtggcatgtgcctgtaatcccagctactcgggaggctgaggcaggagaatcacttgaaccagggagtcagaggttgcagtgaaccgagatcacgccgttgtactccggcctggtgacagagtgagactctgtctcaagaaaaaaaaaattactattaaaaggagagacattatatactgataaaagggtcagcttatcaagaagatataacaattataaatatgtatgatctaacatgaccacttttgggtggggtttttcccagaatgcaaggttggtttaagatttaaaaaataaatgtaattcaccatattaagagaataaaggagaaaagccataggcagtgcctgtgttcattatggaggtgtaattgtactaagtaccctacagactgtcaaaactggtaatatgtgatgtctacatgatgggaagccaccatagtctggtggttaaatgtatgagctctggaatcagacaatcagggttcaaattccacccagtgtggaatgtgggccactagtacacatgtgacacaaggaaggttttatggcttaaatgctgtcttactaaatttgtaaaaataagtgaagataaactgcctgccaggaaagaatgtgttgtggtatccttgttgccacctcagaaagcctagcagccccctggagatgcttgggatagtcgcctgtcccgggtggccacagaaaaggtgcacccagctcctggaactgaagaagagctagggaagcccctggaggagctggtgttggagccttgacctacgagcctggaggagtggggaaaggtggtgagggtgaactggtgtcatctgcagcagttgtctgaaaggaacaggctgaggtaaatttgccctgtggcactgaggtgcctgcagacatggaagtgacagttatgtaggctcctggagttcagtcttggagagtcccaccttgccaccgagactgtctggtgccaaacacctgcaacccatgataggaatgccaagaagtactagagagtcctgctggggttcagcctctggacctcttgcccttcgatgtttttcctcatgcattttgctggcaatatgcccttagctggggcactttttctctgtcgcatgtcccgtgtgtcacatgcatcaagctgaacagtacctggtttgccatggaggtagcaggtagtgaggagacctctccaaatgtcatatcctccaaggacccggcagcgcacaaactgcccttcataggcaacttgcttagcaaggtttgcccccatcctgctcgcatgcctggccatgctatcatgcactcgttcaacctgacccagcgtgctcccccttctggctgggatcactccactttggctttttccctggtagttctaccaggatcctggtgtcatatacccctaaaggacagtatcccatcaggaaacctcagtgttcctctctggcgatcctaaggggactctctgaaaatgacattgctgtctgcttgtaccacaaagtggccactccagaatgacaaagatccctcctccaaggcacaaatggactctcctccctcgtcacctctaagacctgggacagccactcacacctccccccagatccttgcttaaaggagaccaagaagaagataccaggggcatgaaggaaatggatactgaaggaggaagatcctcagtgtgggagaagacgcagttagagaaaaggggcccctatagcagtgggagagtaccatcagcatctaggtccctagcaaccagcagtagcatcacatatttgggagcagtcctgaacccctgaagataagcctctattccaatcactcagaagacagctgaggttagattttacagatgtcttctatgagttcgttcacaaaagatcatgccatcaccagcccagatagtcctgcctgctagaggcttcctgcctcttcatggcagtgaaggaggtgcagcagcgctgtatggccagccacattctccttcctgctgccagagaaaggaagagcttgatgaaggccattatcaactcagctctccagccacattgaagtcaaagacagcaactcacagaggaaagctttcagatactctgtcaatgagaaattctccactcacatctgccagttgtagtctctgtaaacagaaattgtcagtgcccctgctgctgccattgctgcccccattgccactgttgtgagagtgaggagagctgcccccatctcctaccttccctgcatagttactgcagaagaccttagcttggagaaccctgaacacgaagggaacctcagggtgggagaataattctcaggtcccttcagacagcgtagcagctcagccttcctgttctccctacctgctgtggaggccacagatcctttgccattggtcaccttttccttgcagattccagaaactaccaaattagcagtcactgacttggctggcctgttaggccactcatactctctgaccctgtacctacacacacatcagatactgatcatgaaatgagatgcacagttcctgactctccttttgctcttcctgctatttctcactttggattccaacctatatttgctattccacttaataatgagaacaggggccctctgcattccagtccctcggtcatacttgcgggatcctctacttctgcctaacccacacgtcctagaactttctccctctccttaaagcttaccttctgcagaatggagtcatatacacctgtgcaggtggattctcctccccttttcttacagacccctcctcaagttgcttgcaccagtacccctgtctttaccagccaacccatcactgcttctgcagtcacttctagcatgccaggcagcctgtctgcagactggacttcccagcctgcctggactgtgttataattgatgtggatagtactcttccttccaagctttcttcttcaggtctccctcaagatccggggtgagcttcctcccattggaccaggcccatcccagtgtggagcggatatcccctgcaaaggccatcatccccaccagcccacctgcttttatggtcagcagccctacttgaacttctaagcttgcttttgattcaggaaacacttaccagctgaaatctgggggtcctgattcagggccttgccagagaaccactccccccagtgccctgtcttttctggcccacctaccactgattctgcagtcacctccactccagtatacaacccgtcttcagacttggtgtctccgcctgactttgcctctaaggaaatcaacatgggtaccatgcccatgtccccatctgttatcatcctgtctctccctgcaatgttaacagctgtttccctttgagaaacctgccagcccctgaaaacccttcacacttaacctctactgcagccctagaacccaatggcagcacaactcagttggcttttgggaactaaacactcccgtgtccactttggcatcaatgtcagcattcaggcagcccatggtggtgcctcgggtgttttacccattggtgtggacactcttactcttgccatgaaatgctaccagaaagcacaacactgaggactgttgctcatttcttgctgatgccaatccaagccaatttgtatttgtgggatctgaagcccttatggatagcaaaagctttggggtcattgggtctaccacgcagagtctaccaccacatctagatcgcttagctttggagcaaaatggctgggggacagccagtaccacagctcatgatgggggaggcttagacctgagcgccagggtcctgtcagccctgatgcactcctgctgcaattggagaagccggcactgctgagagcaaatcaaatctgccctgggaaacactttccttcccacctgtagttagagcacctggtgccagcccagccaaaacacgcctactactactggaagatttgtgatcactgagaaggagtgtttcagaagacatggctgttcccccttttgttcagatcacctgggacctgtttggccagagcacttgtgttccagtggaagggaccagcaccatacctgtgctgagatccttctcttcctgccccagtcaagccacctggggcacacctaactaaagtacacctgttgcagtctaagggaccagcactgcatctatgctcggatgcctttatgttcctacctatagccagaacacctgaatcccacctgtccagggcacgtgtgttgcaatggaaggggccaacatcatacctatttttagagagtcttctcttcctgcatatggtctaagtactggggcccacctggccagagcaaacctgctggagatacctgcaccactgagaagaaatgcatgccacgtgatatatctgttcattccttccatcagacacctagggcccacctgtgctgtttgaagggctggcatttcacctgtgattggagatgctactggcagaggacctggggtacacagtctggagcacaggtgatacactgggcggaggcagccccattcctgggctccagggtatttgtatgctcagcatcattgacagctgctggcgtggtcttgcccagggcacatctgttacagtctcccaggagaacaccatacatacacctttaggaagacacttctattcctgcactcactcacaatacctgggctctatctagacaaagtagccctctgacttggtgtagtgaacaccattgagaaaatacctggctatgggccagttttccattagtcttagactggcaggaccccttgctgcctatagatatcccgttttgtcttgcccatttgccttaacaagccccgttctttcttttccagattgctatacaaatatgatataacatagccttgttcttattcattaatcctctgtgctaagcttcagcacttttgctccatctttcagggcaaatgtacctccagcatgagcatggaagcagcagtctcgcttaggacacatttgtcacctgcccaggcttcctttggaggccaaagtttgggatcaccaactcattcattttcttctagtgaaagaaacaatatctcatcaactttaagcaaaagctatccagaagtagctgatagtggtgggggaccacagtttgccataaatggaccttgctccattaggaagaggctccacctcttctagttatgtcaaacaaacttaacctgccctctatcatcctaaagaaagctggcagcccaacccttcaggtgttttgtatatatgttaaagggtgtgggttcagatgagactggtcagaagtcaacacactggccttgaggcagtctactgtggaaagaagaaaaagatcagtaagtatatccaccacaccatacccagtttcaacttctcagtctggtagaaccaagctatgggccagttttcctgccatcttacgctggcaggaccccttgctgcctgtagctgcctcctttggtccagcccatttgcctcagtgggcccttttctttctttcctagactgataaacacacacacacatatatatatacacacacatatatgttatatgtgtatatatatatacacacacatataatgtatatgtatgtgtatatatatacatatatacatcacgtgtgtgtatatatatatatatagagagagagagagagaatgccttccttttgttcattgatcctctctgcttacatgtcttttctattttagtcaacggtggaagaagaattgacttctttctataagtggtgctgtgttgaggcagatgtaacttttcaaagttctatggctcagcaaataggaggtggcatagccacactttacaactgcacaggctgacatctgacatctctgtgttttgatgtaaaggatagcagccatgaggaagggaagctcaaaggaggaagggatgggtgaccctcccttgccttttccctctgtgctcctcttccatcactctgatttggtcgtacgccagaccacccccgatgtgtgttagggaaacaaaattaacaaatttggttgaaaataattaaatgtctcatttgtgtctttctctttcatttagacttaagaaaatcatccccacatattcacacctcgaccaaagaggatgggtatggtatagaggcccttatgtctagaagaaaaaaaggaagaaaaagctcatggctcctttgtgattattggaaattttaagactaggatgtcacatattatatagaagtgttttcatgctccatgaaaattcagaaaagatcattttttcaagaaaatacctagataaggtctatttggaaaagtaattggtctggctctagtataaaaccctaaaatagcaaattacagtccttaccattttatccaaatctagctggctgtggagtcctgctgtgtctccaatagacttaattcctgaaaatacaatctttcctaagataattcaaggttcaggagaaccagctgaagctgggggaaaaagaaaaatgtaagcatttcccttagcttagacatattattttactaaatacttattcagagttgattctacactagacattgtgcttgagcctagtgacatatagctgaaaggcatctattgcctcaaaggaatttacaatatagtaggagtgatgggtgaatatatcaaaagtaaaatcggaggggttactagtagggatatgggagcagtaggaacacaaaactaagaatatcatttcttcagaaactaacagaactagactaacagcaatgaacaaaaaaaaattgtaaatccttccctatcgataattactttaaatataaatagattaaatttctcaatcaaaagacacagagtagctggatggataaaaagaattacccaactatattctgtttacaggaaactcactttagatttaaggacatacattgtttgaaagtgaatgaatggaaaaagatattccatgcaaatagtaaccagaagtgagtcaggtggctacacttatattagacaaaatagactttaagtcaaaaactaccgtaagagacagcaaaggacattatataatgatacatgggttaattcatcaggaaaatataacaattataaatatatatgaaccaaacataagaacacctaaatatataaagcaaacattggcaggaataaagggagaaatagacactttataataataataggagacttcaattcctaactttctgtatggatagaacatgcagacagaagatcaattagtaaaatcaagacttaaacaacactgaagaccaaataggcctaacaggcatatacagaacatctcacccaatagcaacagaatacacatcattctcaagcccacataaaatattctcgggtatagatcaattataattttatctagatctgggtggctatagagtcctgccatgtctccagtagacttaattcctggaaaatacagtcttttctaagataattcacagtttaggagagccagctgaagctaaggaaaaagatcaaataacaaatttaagaagatcatatcaagtatcttttctgagctaagtggaatgaaactagaagtcaacaccagaaggaaaactggaaaattcacaaatacgtggaaattgaacactgaagaggagagtacacttccaaactcattttatgaggccagcattaccctgacaccaatgccaaagacagcacaagaagaaactattggccaatatccctgatgaacatagatgcgaaaatccttagcaaagtattagcaaattgaatttaacagcacattaaaataatcagacaccataatcaagtgggatttatccctgagatgcaaggagggatcaatatatgaaaatcaattaatgtgatttactgcattaacataatgaaggataaaaatcattttatgtggctctgaaacccaatggcagcacaactcagcttttggaaattggaatatgcaggaaaggcatttgatgaaatttgacaccctttcataaggaaaaatatctcaacaaattaggttacatggaatgtatctcaacacagtaaaggccaataggaaaaggccatagctaacatacagtcaacagtgaaaaactgaaagcttttcctctaaaattaagaacaaggcaaggattcctgctcttactacttctacttaacttactactggaagtcctggccagagcaattaaggaagtgaaataaataaaaggcatccaaattagaaagaaagatgtagtaaaattgtccatgtttgcagatgacatgatcgtacatatagagaattctaaagaatccataagaaacctgagaactcagcctgggcgtggtagctcacgcctgtaattccagcactttggaaggccgaggtgggcagacgatggggtcaggagtttgagaccatcctggccaacatggtgaaactgtctctactaaaaatacaaaaattagctgggtgtggtggcaggcgcctgtaatcccagctactcgggaggctgaggcaggagaatcgtttgaacccgggaggaggcagaggttgcagtgagccgagattgtgccattgcactccagcctgggagacagggcaagactctgtctcaaaacaaaacaggctgggcacggctcacccctgtaatcccagcactttgggaggccgaggcgggcagatcacaaggtcaaaagatcgagaccatcctggccaacatggtgaaatcctgtctctactaaaagtacaaaaaaattagctgggcatggtggtgtatgcctgtagtcccagctactcaggaggctgaggcaggagaatcgcttgaacctaggagggggaggttgcagtgagtggagatcgtgccactgcaccctagcctgggcgacagagtgaggctccatctcaaaaaaaaaaaaaaaaaaaaatactgttcaaaaaaggcagaattcaaaaaatgaaaaggtaaactataacaagaaaaaatatttgcaaaatatgtgtctaacaaaggactgctacaactcaataataaaatatcagtccattcgataaaaaattggcaaacatttagctatactgaccaagataaaaggagaaaagattcaaattaccaaaatcagaaatgaaagaggaaacattactatcaacattatagaaattaaaagaactataaaggaatactatgaacaattttatacctagaaataatataatttaggtgaaatgaacaaatccctagaatcacagaaactatgaaagctaacttgagaagaaataggataatctaataggcatacaacaagtgaggagtaattaattcataatcaaaaaaccacccacaaaaaattccaggtccaggccaggaggagtggttcacccctgtaatcccagcactgtgggaggccaagccacccagatcacttgaggtcaggagttcaagaccaacctggccagcatggtgaaacccatctctactaaaaatccaaaaacaaaaaaattagccaggtgtggtggtgcatgcctgtagtcccagctactcaggaggctgaggcaggagaattgcttgaacccaggatgtggaggctgcagtgatccaagatcactccactgcactgcactccggcctgggcaacagagcaagactccatctgaaaaaaaaaaaaaaattccaggtccagatggctctactgctgaattttgctaaacatttaacaaagaattaataccaattctttgtgaactgttcattttatggacagttaactcattttatgaagccagtattaccttgataccaaaacaagacaaagacatcataagaagagtaaagtacaggccaatatgattcttatgaatatggatgcaaaactctcagcagaatactagtaaacaaaacccagcaatatataaaaagaatgtatgctagcaatgcaaggttggtttaacatccaaaaataaactattgtaatacataatatcagtagaacaaaaaacaaatcatatggtcatttcaacacatgcagaagaaacatatgacaaaattcaacatcttttcataataataattttttaaattatttttattttttaatatagagatggggttttgccatgttgcccaggctgttctcaaactgctgaactcaagcaatctgctggccttggccttccaaaatgctaggattgcaggtgtgagccaccatgcctggccataataataattttttaaaaactcaacaaagtagtataaaaatgaacttcctcaacctgataagagcaagtacaaaaaacccacggcaaacatcataatgattaaatttggatgctttccctctaagtttacaaacaagattataggctgggcatagtggctcatgtctgtaatcctaccactttgggaggttgaggcagccagatcgcttgagcccaggagttcaagaccagcctaggtaacatggcaaaaccctgtctctacaaaaattacaaaaaaattagccaggcatggtggtgggcacctgtagtcccaactacttgggaggctgaggtgggaggatcacctgaacccaggaggtcaaggctgtggtaagctgtaatcgtgccactgcattccagcctgggtgacaaagtgagactctgtctcaaaaaaacaaacaaacaaaacaaaacaaaaaaacaagattataatgtctactctcatcacttttatttattattgtacttgagtctttagctagagaaatttgcagattagagttattttgtggggaatgtccaaaagaatccaatgaaaaatctattagaactaataaactagttcagcagtattataagatataaattaatatacaaaaatcaattgtatttctatacacttgcaatgaatcatccaaaactaaaattaagtaaacaatttcatttacagtaacatcataaagagtaaaacatttacgaataaatttaacaaaaacattttcaacatatactctgaaaactacaaaacattgtttaaagagagtcaaaaatatctacagaataggaaaaagaatgcacattcacgaataagaaggcttgatattgtttaagatgacaatattccccaaactgatctacagattcaaagcagtctctagcagaatcccagctgaccactttgtagaaagtgataaggtgattgtaaaattcatatggaattgcaaggaatcctaagtagccaaacattttgaaaaagaaaaacagccgggcgcagtggctcacgcctgtaattctagcactttgggaggccaaggcgggcagatcacctgaggtaaggagttcgagaccagcctgaccaacatggtgaaatcccgtctctactaaaaatacaaaaactaggccaggtatggtggctcgtgcctgtaatcccagcactttgggaggccaaggcgggcggatcacaagatcaagagatcgagaccatcctggctaacatggtgaaaccccgtctctattaaaaatataaaaattaggcaggcgtggtggcacatgcctataatcccagctactcgagagactgaggcaggagaattgcctgaaccagggagtcggaggttgcagtgagccaagatcatgccactgcactccagcctggtgacagagtgagactccatctcaaataaaaataaaaaataaaaaagaagaagaaagaaagcaagaaagaaagaaagaaggaaggaaggaaggaaggaaggaaggaaagaaggaaggaaggaaggagaaggaaagaaagaaagagaaaagaaagaaagaaagaaagaaagaaagaaagaaagaaagaaagaaagaaagaaagagaaaaaacaaagtaggagaactcacacttactgatttcaaaacttactgcaatggcaatggccaggcatggtggctcatgcctgtaatcccagcgctttgggaggccaaggtgggagcattgcttgaagctgggaggtcgaggctgcagtgagccatgctcatatcactgcactccagcctggatgacacagcaagaccctgtctcaaaaacaacaaaaacaaaacaaaagaaaacaagagttattgcaatgcaatagtaatcaagactgtgtggtattggcacaaggatagacatatagatcaataaaatagaattgtctacaattgcatgaaataaacccataaatcttgtttgattttttaattatttcaatcattttgttacatttctctgataaatttctgaattgcttttcggtattatcttggaaatcactgtgttgccttaaaattgctgttttgaattcctgatcatagagtttgcctattgtcatcttgctaggattggtcactggctccttactttgtccgtttggggaggtcatggttccctgtctgctgttgtttcttatggatctacatctatgtctttgcattgaaggatgtgttagttattccagctttctctgtctggtttgtttttgtttttcttagatatgtttgcttagagattctttgtagtttatctgttgagtatcttcttcactaggtcactctctcctttatggtgctaggtggcaccttaagcccaggtgtgtctttgctctagtgaacattttgagctttgcccatcctgaatgagggaggtccgaaaggggctaccctggcagggtgggaaggctgactaggggtttctgcccaggagaccctctcatttgagttctgggatattgctggtgattatctttgtgctggatatttgtttctgtttctgtggtgagagtgaagccagcttgcttctactctaccattttggacctagtacaagtacaaaacccatatatctttcgtcaactgattttttaacaaaggtgctaagaccattcaatgggggaaaagtaatctttcaacaaatagtgctggggcaactggatagtaacatgcaacagaataaagttggaccattgccttgctccatatacaaaaattaactcaaggtgaattgactacataaattaagagttaaaactataaaactcttagaagaaaacatatagaaaaagcttcatgacattgattttgggaatggtttcttagatgtggcagcaaataacaagcaaaagataaactagataaatgttttgccacatcaaaatgaataacttttgtgcttcaaaagatagcatcaagaaattgaaagtaaaacccatagaatgggaaaaaatatttgcaaatcatatacgtggtaagaggcttgtactcctaatgtataactcttacaactcaataataaaagataaaaacctatttaaaaataagcaaaggatacgaatagacatttctccaaagaagacataaaaatggtcaatttgcaaacaaaaagatggttagaaacattagtcattagagaaatgcaagtcaaaaccacaatgatgtgccatttcatacccactaggatggctagaatcaaaaagtcagataacaaaaagtgttggcaaaaacctggggaaattggaacctggaacctcaaacactgttggtgggaatgttgaacggtgtagccactttggaaaacaatctgtcagtttctcaaactatcaaaaagagttactgtattacctagtaattctacttcaaagcatgtacccaagataaatgaaagcaacccatgcccacacaaaaacttgtatatgagtgtttgcagcattattcataatggctaaaaggtagaaacaatccaaatgcccaggtgattaatgggtaaacaaaagcggtacatccatataatagaatgttatttggtcataaaaacacatattatttagccataaaaacacccatgctacaacatggatgaatcttgaaaacattatgccaagtgaaaaaagccagacacaaaagaccatatatcatacagttccatttatatgaaatgtccagaacaggggatccatagaaacagaaagcagatcagtggcttccaagggttgaaggatataggctcgtagctgaaaaatagagggttttcttgagatgataaaaggttctaaaatggactctggtaatggttgtacatatctataaatatactacaaaacactgaattatacactttgaatgagtaaattatatgaatatgtgaactatatctcaataaagtgtaaaaacaaaacaaaaattaccaatataatgaataaaaatgaggcatgaatgcagatctgaaagactattaaaagtacaaaaaggaactaaaaatatctttccaaaaagaaaactgcaggtctgaatgattttaatggttaattctatcaaacatataagaaagatgttttaccagcattaaacatactctttcagagaataaagaaagcaatttttcctaactcattctgtgtaactgacattaccctaatataaaaacctagcaagaaagggacacaatagattaataaacctcatgaacatagacataaaattcttttttttttttcttctcgttctgtcacccaggctgaagtgcagtggcacaatctcggctcactgcaacctctgcctgggaggttcaagcgattctcctgtctcagcctcccgagtagctggaactacaggcatgcaccaccacgcccggttaatttttgtatttttagtagagacagtgtttcac[131 bp omitted]aattaaattcaaccaaatagaaaagaatgacctagcatgaccaagtagggtttgtctcagatatgtaaggttggtctaacactcaaaatttaaaatgtaattcaccatattaagagaacaaacaaaaagtcatatgattatctcagctttggacaaagtaattgaaaaaaattttaattctggatatcaatcccttctcaaatatatgatttacaagtattttttccaattgcctgggttgtcttttcactctgttagatagtgtcttttgatgcacaaaactttttaacatgtatttttttgtggcctggcatatttgtttttgtagttatggcaagagttctgagattaattttaatacacctttgactccagacacaatagttcacaagcaatcattacttaatttataaaaacatcttttctatgacaacatgggtttcaagtaatagttttatttttctttccaacttttattttaggtttaggggagtacatatgcagatttgtgacatgggttgaaaaaatttaacacctctttgaaaaaatttctcagtatagaaagaattggagggaacagcctttacatgataaagcacatctataaaagccttaagttaatagcacactgagcactttccaccccccgatcaggagttggaaaaggttatctattgtctccacttgtattaaacattttactggagatcacagtaactgtaaaaggtaagaaaaataaaatcatacagattaaaaagaatatgcatagaaaacataattgtatatgtagaaaacactacccgatatacaaagaaactacaagagataagaaaggaatttactgaggtgccatataaaaaagcaattatttttgctgtatcctactacataccaatagacagatagatagacgtagatatatatgtgcatgtatatatacacatatatgtgagtatgtgcatatatatacatgcatatatatatatataaatgtctatctatatgtacacacacacatatacacaaaatgcataccatgatagtggactggaaaaagttaagtcatccacttaagatgacatttaagaaaggtaagtcatccatttcaaccaggaccctgaaagttgtccatgaaattattaccagagatattggtgtccatggggcataggcttttaagccaggatagatcctgcacccacctgatgtcatctcatgtccttgcacccaggaggagatgccacacacaactgtgtaggtagctgcaaagctcagtaagaaaagaaatgcccagttttgctgtgctgacaattgttggtctctgcaaacatagaaggtaagaaagagaaataaaaggcatgcaggtggaaagagaagtaaaactgactttattcatacatgatgcatggaaaatacatgtagaaaacccaaaggaatctgcaaaaaaaaaaaatctaccaaaaataaacaatgaatttagcaagatcccaataatataaggtgtgtgtgtatatatgtatgtgtgtatacaagtactatatatacatatatatttaatgcattttctgtgttctaccaatgaactatttgaaaataacatttgcaaatcccataacatacttagggataaattagcaaaagctgagtaagacctatacacagaaaactacaaaagagtagctgcaaactttctctgtaaagggtcagggagtaaataatataggttttataggtcacgtatgatctctgtcacatattctctggaattttctgttgtttttaaagaccttttaaagacgttaacatcattcttagctaaccggccttacaaaaacaggctatgagtggggcgtggtggctcacactcataatcccagcactttgggaggccaaagcaggtggatcatttgaggtgaggagttcgagaccagcctgaccaacatggtgaaacccgtctctgctttatacaaaaattagccgggcatggtggtgggcgcctgtaatctcagctactcagaaagctgaaacaggagaatcgcttgaacccgggggtgggtggaggttgcagtgagccaagatcgtgccactgcactccagcctgggtgacagagcgagactccctctcaaaaataaaaataaaacagactataggccacatttggcccatgggctgaaatttgctgacccttggtataaaacattgctgagaaaaaaaatgtaaaagattaaaatatatggagatatatcccgtgagatggattagaaaagttaatattgctaagttttccattttggccaaactctgaaatctgttctgtggaattattacaggagatcctggtcccttggggcacaaggattttaagccagggtgaatcttgcacccacctgatgtgccatctcctacgcttgctgaggcagctgtgtggttggctgctggggtccatttgaagagaaaggccctgtgggatatgctaacaagtggaactccctgccctacatcgtctgaggaaactggaacccagccaaagaagaccttccagtaggcagtgcctgtgatcactgtaggtgtgcatggtgctcagtaccctacaggctataaaaaatagtaatgcacgatgcacacatgataaggaggcatcacagtacaggtggttaaattcaggaactctggaatccgagagcctgggtcaaatcctgacagggccactaccacctgtgtgagccaaggaagcttctaaagttttacaaatgctgtttcaccaaatttgcaaaatgaagagaacctgcctgcctggtagagatattgtggaaagcagcatccaggaaggtctgagcacctggtccccaagtcagaaaccttcacagcccagatggggatgccctaagttcatacccttctaggcgaccacagagaagtcccgcctggctccaggactcggaaaagcgctagagagcttcctggaggaggcggcatcctcccatgctacctgcatagagaagagagaagggaaactgggtcctctgtggcggctgcctgaaaggaagcagctgggggctcttgctccctgcctgtgctggtgtcttctccccaccttagcccaggccggctgcagcggcggggctgcctgggcggagtcaggagacagcaccgcccggcccctccccaggcaccttccctgtgagccagctccctaccctgggaggatctggggagttcctgcctctggctttgggcaaggtctgcctccagagtccccagctgcaagggccggcgcacccacgcgcactggttgccaaatctcccgctttcaggccaggtgcggagcgcgcctcgacagtcctgaacattctccacttaacggctgagagccgctgggagcctaacgcctgcaaccgagtgagctcgagtccggctggggtcggaccgttggacctccccgttggccctttgttgtacttcttcgcgccctgggctcgcgcaagctttctctgccacgcgttccaacggccgctcaccggcatcgggctgaacacggtgcgcttcacctcggagttcccactccactccaaggatccaacagcgcacaagctgctcttcacgggcaactacctctgcaagcttcacccccggccccgccacgccccgcagggttccctgtctggtctggatcacctcgctctccctgcgcctctctccttggcctagctagacaagtgcttctcacgatccagcgcgtttaccgctcggtttcgtcgccgctaaggggtggtggtgtctgatccgtcaggctctgcgcttctctctcggatccatcctcaatgtccaggcaggactctcacatgaagccggtgctgtctgctgttcactctaagatgtccagccactcaggacagttacgatctgtcatccagggcccaaaccgactctcctctattgctatctgaggtaggcagtctcctctgtgaggtcggtcccatccatactgcctagatccctgcgcaggaagactgagatgaggaccctaggagacagcagccagggatagcgaaggtggaggatgagtataaatagcgaccccagcgcgatcagagaagctcccttacccccacccatcgcagtgggagtgagtcttcagatctacccccaagacaacgaaatcctacccgggccattgaagggaaacctccactccaacccccagaagacgccttagatgagaaagtgaagagatattgtatgagctcattcatcaaaggccatgccatcaccagctcaggcagtgctgctaggggattcctgcctctctggaggtccagttctctctgaagacagagaagatgcagggaggaagggtttcaaacaggaactctcaacccacgtctgccagttgtagactctgtaaacaaagttccaactcgcccgctgctgccactgccgctgctattttttgaggtcaaggtgagctgcccaaactctcctaagcttttttgtatagtcgttggagaagatgtaggcttgaagaagaaagcagagccccagtctaaccacatgttcttagaagataaagccaaggccccttcagatagcagtgcagtgcccctcagcctgccccttctttcttcctgcttgttgcagagatggcaggcaccccacccttggccattttcaccttgtagtttgctgatactaccatgttaccagccactgacttggctgtcctgtcttccaggcccccagtcccttctgcccctgtaccagtcctcaccccatatacagatcattaaatgaaatgcccatatcctaactctcctttttttttttttcctattcttgttgtttctccccttaggttcaatatcattttgggagttcccctttatgggaataaaagccatttccatttcagtccctcatctgcagatttttttggggggtggtggggcagggtcctgctctgtcacccaggttgtaacgtagtggtgcaatcatggctcactgccgcctaaaactcctgggctcaagcaatcctcccacctcggcctccagagcagctaggactacaggcatttttttcttctagagatggagtcttgctatgttgcccaggctggtctggaactcctgcttttgagtgatccttctgcatcagcctctcaaaagtgctgggattacagatgtaagccaccatacccagcccagatctctacttttttttttttttttttttttgagacggagtctcgcactgtcaccaggctggagtgcagtggtgcgaacttggctcactgcaacctccacctcccgggttcaagtgattctcctgcctcagcctccagagcagctgggactacaggcatgtgccaccatgcccagctaatttttgtatttttagtagagacgaggcttcaccatgttggccaggatggtctctatctcctgacctcgttatctgcctgcctcggcctcccaaagtgctgagattacaggtgtgagccaccacgcctggcctagatctctacttttgacctcaccacatctcctaaccccttggcctttgcttcaagtctacctcctgcagaattgagtcatctatcagtttagtaatctaatcagaatctatctagtcatctaatcagaattgagtcattgtggatttttctccctttttcttacagactcttccacctgtatgcccatcttcatagaccggcccatcactggtgcctcaagcattttcactatcacagccagtaatctgcagactcaacctcaagcctactttgtactttggtataaactgcatggataccaatcccttttcacaggttttcatctcctggtctcccataggatccaggatgagtatcctcccatttgaccagttccatcccagtatggagcagatatcccttgtaaagaacacagtctccaccagcccacctgcttttatggtcaacagccctacctgaatttccaacattgccttttgacccaagaaacacctatcacctgaaatctagggttccagacaggcatcaacaggaaaccactctcttcaatgccctgtcttttctggcccacctaccactgcttctgcagtcacctccactatagtaagcagaccctcttcagacttggcatccaagcctgccttttactctgatgaaatcaacatggataccatgcccatttccccatctgttatcttcctgtctctccctgcaatgttaacagctgtttccctttgaagaacctggcagcccccagaaatccttcctacttaacctctactgcagccctggaacccaatgacagcaccactcaggcagcttttgggaatttgactcccccatgtccacctttggcatctgctatggtttgaatgtgtcaaccaaatttcgtgtattaaaaactcaatccccaaattcatatgtaaatatgtttgaaggtgggggcctttgggaggtaatgaggattagataaagtcatcagggtggacccctatgatgggactggtaaaaggaagagacacctgagctgacaggctcttgctcttgccatgtgatgtgctccaccatgtaacgacatagcaagaaggtcttcaccagatgccagcactgtgctcttgatttgctatcagagaggatagtgccatacctctggttggagacagatgacttcaatacaaagcttatgacctcagtcagagtgcctggggttcaactgggtgtagcacatctgttgcaggtgcaaatgtgtgtttaaaagtccctgtattcctgtctcccaatcagagcagtaagggctcacctggacaaagaacagggctataatgggtggagaccacaccatacctgtgtttgtatatatgtctctttctacaatgattgagatagttctgaccggaccatatttgttgtaatcagagggtataacagcatataatattagggagccactcctattcttgccttcagtcagaatacccagagtccatccattcagagtagcacctttgacttttttttttttttttttttgagatggagtcttgctctgtttcccaggctggagtgcagtggcatgatcttggctcactgcaacctccacctcccaggttcaagcaattctccctgcctcagcttcctgagtagctggtattacaggtgaccaccatcatacctggctaatttttgtatttttagtacaaacaaggtttcaccatgttggccaggctggtcttgaactcctgacctcaggtgatccgcccacctcagcctcccaaagtgctgggattacagacgtgagccactgtgctcagccccctttcagaaccatcgagaaaatacatgtgcttggaagcatttgtgttcctagctttggttacagcaatttcctttctggtgtggacatggcaagcaacagtcttgcttttggggcactttttttgcatggtcagggctcactagagacagagatttggggtgaccaattgatttattttatttggtgaaagaatgaggatctcatcaactaaggagcaaaagcttcctctagaagcaaagagaggccactatcagtcatgaatagaccttacactttgggatggaggctcagtcccacctagagatgtcaaacaaaccaaacctgctctctgtcctgctaaacaaggtggaagcccacacattgtgaggcagatgagaccagtcagaagtcaacacagtggtatcaagcagttccactgtgaggagtagagaaaactatttaggtatcattgtcatgcatccctggctttgactgtcagcctgccagacctaacccctggcccaatgttcctgtcttgaaactagaaggatgctcagtgctacctgcagctgtctcatttcccatcacccatttgccttggtgggccctcacctttctttcctagattatatataagatgggatgacgtatcctttcctcctccctctgtgcttctcccccaaccatctgacctcaatgtaggccagatatcctggacatgtgttagatgacacttgacaattttatcctttcaaaatgcttaactggccgaggggtggtggctcaaacctgtaatcccagccctttcggaggccaaggtgggtggatcacctgaggtcaggagttcaagaccagcccgggcaacatggtaaaaccccatctctactaaaaatttaaaaattagtcaggagaggtggtgcatgcctgtagttctagctattcaggaggctgaggtaggagaatcacttgaacccaagaggtggaggttgcagtgagccaagattgcaccactgcactccagactgggtgacagaatgagactctgtctcgaaaaaactaaaaatgcttaaacatctgaagtgtctctttcactttgacctaggtcaatcatcccaaacattcatacttcaaccagagagagtggatttggtatccaggctcttgggcctgtagaaaaaaaggaactaaaagctcgtacctactctgtaattactgaaaatgttaagcctaggtgagcatatttttccatttcatctaggagaatatgtatatacacatatatatgacagatatgcacaaatatcctgtttttagaagctgttagcatgctgctttaaaaaaaaaaataaagttatttggccgggcttggtggctcacgcctgcaatcccagcagtttgggaggctgaggtggtcagatcatgaggtcaggagattgagaccatactggccaacatggtgaaaccccgtctctactaaaaatacaaaaattagcctggcatggtgacacatgcctgtagtcctagctacttgggaggctgaggcaggaaaatcccttgaacccaggaggcggaggttgcagtgagccgagatcacgtcactgcactccgcctggcgacaaaacaagacttgcatctcaaaaaaaaaaaaaaaaaaaaaaaaattcaaggaaatgcccagatgagacctatttggaaaactaactagtctggctgtactctaaacccctaaaatattaccccacaagtgctacaatttcatccagatctggctgatggtagagcagttctcatctctctagacttatgtgctgaagtaaaatatttgcatatgccaggagaaccatcagaagctagtgaaagtgacgcatacaagcatttcctcagctccttacatattagtttataaaacagttatgattctacatgagagtctttctcaggccttactcatattgagttgaaagacatctcttagccgggcacagtgactcatacctataaccctagcactttgggaggctgaggcaggaggatcacttgacgtcaggagctggagactagcctaggaaacatagtaagaccccatctctacaaaattaaaaaaattaactgggcttggtggcatgcacctgtagtcccagacactcgagaggctagagcaggaggatcacttgagaccaggaagtcaaggctgcagtgagccgtgattgcaccaatgcactccaatttgggtgacagagtcaaaccccgtctcaaataaaaaaaaaaaaagaagaagaagaagaagaagaagacatctttcagcccagcagaatctacaatgcagagtgggagataaatgaataaccagaaattgccaactggaaagaatggtgatagggataagggagcaggaaaggaaggaggacataaaactaagtctgggggagataaaacatgaattgtgccttaaagaaggaagaacagccaactaggtggagaagggctatttccaaggtcaagaaaatagcatgtgaagaggcaggggagaaagagagccagtgggacaccaggaagatagtcaggtatgcatagaaacagaaaccaaagtggaagatgtggctgcggcatttggcaaggacacattttgacaaatatatatacaatgatgggacatttgttcattatcctgagcatatagggagtcaccaaaagattgggaacaaaaaaaaagtggcacaattctatgtacacttgagaaatatactgtggctacctgagagggagattagatgggtgtcactccaggggtgaggggcctaagggactccttgccatgactaaagcaaagtgagacaatggctaaagctgtgactaaagcaaaggtgaggacctgacagtggggatggcgaggaggaaacagaagagaaagtggagtaggtgacagcaaggccagggctattctagccatctggcttggacaaatggacatgactcatttggacaaacatatagtgagttcagtttttagttgtgaagtccaggtactactcagaaggctattggttcatttatcaatttaacatacttattgagtatcaaggatgtacttgggacaatttcaagtagcatcaattgcaaaaaaggtaaattcctgccttattggtgcctctatcttaatggggggcggggggagaacatgaacaacacacataaaaaatatgtgcattattttgtagattagctagttaacgagtgctatagagaataaagcagtttgtgggaaactaaatttgggagtagggagaatcatgggtttctgtttttacacaggatgcgcaggatgggccctgctaggaaggtgaaatttaagcaaaatcaagaagcaggcagttgagggaaccacgcagatatctgagggaagaacaacccagagagtgggaatagccactgcaaaggtccacaggaaggctgcccggggtcccagggagtagatattaaagacaatggagatagcatggagtcaagcatgagagcaagaggagagcgcagaggacagggcacagtctatgaaggccttgttagaagtcataagaaaggggcctttaacttagagatgggaatgattggaggatggcctggccaacttaggttttttttttttaattttaatttttattctaagttccatgtacatgtgcaggtttgttacataggtaaacatgtgccatagtggtttgctgcacctgtcaacccatcacctaggtattaagcccagcatgcattacctatttttcctaatgctctccctccccctaccccactccccaacaagccccagtgtgtgttgttcccctccatgtatccatgtgttctcattgttcagctcccacttacaagtgagaacatgtggtgttcctgagttagtttgctggggataatggcttccagctccatccatgtccctgaaaaggacatgttctcattcctttttatagctgcatagtattccatggtatatatgtaccacattttctttatccagtctaccactgatgggcatttgggttgattccatgtctttgctaatgtgaatagtgcttcagtgaacatacacatgcgtgtatctttgtaacaggatgatttatattcctttgcatatataattgctgggtcaaatggtatttctggttctagatctttgaagaattgccacaccatcttccacaatggttgaactagtttacatgcccacaaaccgtgtaaaatattcctgtttctctgcaacccctctagcatctgttgactttttaataatagccattctgacagcattgttctgtagctgggcaggagcatggaagccaggagaacaccaagaggcgaaggctgtggtcagggcaagggacagtgatggctcagatttggcaatagtgatggaacattacctctggcctgtctctatttcctttccatctgctgctcccactaggttcatgttgctgtgcttagagttcaacagagaagccatccagtctgggcttttctttgtgtggggtttctgaaaactgactcagtctcttaaagtttattcagattttctatttcttcttgagtcagttttggtagcttgtgtgtttccaagacttgttcatttcatctaggagaaaaacatacacacacacacacacacacacacacacacacacacacacacgacatatatgtatatatatcctgggtttttttatatgaccattttttacatagaaatgtgtattcttccctttctgtgtcagtaacaaacaaaagatatactaagaatttgagtacactaaagagtttcagatatggatgaaagacaccaagaataggaagaatgaatctgctccctgggttgcacacgataatcaggtaggagcaggaaggtcacaacaaccttgaagaataatgaattagccttgacagaacaaggggttgcataacatttttaaagtagaaaaaacattaagcattttattgttaatatttttaaattttttattattattactatttaataataaagcaatgttttattattaaagaaaat[131 bp omitted]agcaagaccctgtctctacaaaaaaaatttaaaaattagccaggtgtggcggcacatacctgtggtattagctactcaggaggctgaggcaggaggatcgcttgagcccaagagatagaggctgcagtgagctgtgattgcactactgcactccagcctaggcaacacagtgagaccccgtctctaaataaataaacaatcttataagtataaaaatattaaaaggtctagctgggcatggtggcacacgcctatagtcccagctacttggaaggcagaggtgggaggatcatttgagcccaggagtttgagtgtgaactgtaatcacaccactggactccagcctgggcaacaaaagtgaaactctatctcaaaaaaaataataataatgataacaataataataaaattaaaagatttatcaattaataagttgagcatcatttaaggacatggaaatcctgcatggcctctgtggtactgtttttcaatccatcatttgatttcatttgcatcctgttttgtgagatttttcctatatgtatatcaacactcagtttgggaaaatacatttatcctacatttcagagagtatatgtcaacttgcaaacactccctctccttattcatatctactgaccaacttctaaaaataaaaataaaactgaaatcacagataatgtagacagaaaaatgaaaagacagaaggccaagacagaaagatgaagctgggtgtggtggatcactcctgtaatcccagcattttggaaggcttaggtgggctgatcacttgaggtcaggagctcaagaccagcctggccaacatggcgaaaccccatatctactgaaaatacaaaaaaaatagccacatgtggtggcgggcacctgcagtcccagctactcaggaggctaaggcaggagaatcacttgaacctgggaggctgaggttgcagtgagctgagatcgcagcactgcactgcagcctgggcaacagagcaagacgaaagaaaagagaagaaaagaaaaaagaaaagaaggaaggaagggagggaaaggaaggaaggaaagaaggaaggaagggaaggaaagaaaaagagagagagatagggagggagggaggggaaatgtgttattttgagaagaggaaatggatggagaaaaaatggaaatggcatccctgtagagaactggccactctgcagaggcatgcaggggaagcgccactccacactgtgttctgggctacttcagcacctcttggggtgattctgaggacccagatcctgtcctcaggtatggagacatatcccaccatgctctctggggaccctttgagtgtgttcttcagaacagggaaagagagcattgtgaaggtggtgctaacatgttccagaggggaaagaacaagtggctgaccttcacagaaagcagcagaacctccagcctgactagttgtgtggggaagagctgtccagagcagtctctaagaagcctagtgagcatgggtgcctgcaagggtcttcatggaacagaacaggctgactccaagtttgtatctttgcagctgaaaggtgctatgtgagctccattggttgttcccaaagactacttctaggagcacttcaaggactggccatgtgccctgccattttagcaggactcaccacaaggaatgtccttggaggtaaggagaagaatatttgccgacaccctgccatgatcagaaacttcctctaaaatattgagaaatattttcactttcataagcaaactacaaatagactacttctatgtatcatgtcatagaagcccagatgctagaaatgagacatttgcttggagtacccatacctttaggatatgctgggttagtggtcctaattccaaaagaggccactgttgactgggacacagcaggatccttttgaactagctagcagtcatggctgctccccctggggactttggaagagctgctccatgaacatgcccaggaaagtggctctgtgcagcaccaggggtggagtgtggtggccatggaagtgctcctttggaactcccttcatgagacctgttggggcgcaggcacagctgatggacagcttccaggagctgtgctttagatccaccacagtgtttattccaggcctcccttcccctaggctcctcccatctaatgaccatgtacaacaaaggtacaagggcgcaggcaacaagaatctggcctttcctgcccaatgtgataatcctctacagggtttgtgtggctccaggactccctactggcctggtcaaaaacttatcagaagtgtgctgagatgtgactcatttgctacctagtccttccttctttcactgctttcacaggtagaggaaaaactctctccaaccgtgtttttcctctgcactcacaccaccaccacaatcatcaacacagaataagccttctgtgaccaaatgtgggggctttccccacacaccaggaagtggacaccagttaggtgtcttccaattcaattccaacgctacctacctggagatagctccatatcccacagctggtgggctcagtccccaagactgccccctccatacccttagacaccaatcacaagtccagtcctccaaaacttctaaccaacagacttcaagttacagttcccacagccccctctttgggtttgattaatttgctggagcagctcacagaactcagggaagcacttatttacatttactattatactttattataaagggcattacaaaggacacagatgaagagatggtatgggggaaggagcacagagctaccatgccctccccatgcataccatcctccaggaacccccatgtgttcagctatctgaaagctcaccaaagccaatcctcttgggttcttattgaagcattccttcccccagcgtatgaggcaggaccttctcaagggagggtcttaagacccacaatcagaaaggcaggggaatgtttgaaatgcttgtttcctggtgccataaagaaatagcacttgaacgtaaatttaattttctcagcaaggccatttttatgctttctgcagaaagggtacactcgccattagttctgccatgagagtacaccaaacaaaggagacagggtcatttataacctgatgcatccaccctactgctgtgtccagtttccattggctggaatgggacctcatattctgtatttgtcctgactggctagcaacttagaactttttaaaagaggcaaaggcagatgagaacaaaggaaggaggatgtaacttgtggaatgctgagaaaggtaaaaacaccttcaaataaggaagaggaacaggctatgacctaatgcttgcttggaccagcataagcatgccagggcaaatatttaggctaaattgtgggagctaagaacataaagtacattgatttctttattatggttagcagatatttaagaatgttagcacaggtctttgaataaattttgcttctaagagaagttactatttattcctaattagacagggaagaaagtctttgaagagaaacctctactttacttttcacaggaagattacagtcatgccctggggcaggtgaaatgagggcaggagacagattctgtttcctgaggcctgcccttggggcccaacacacccaacattataacaaaagactgtaacaagagctacgagagttaagagccaggagccatggatgaaaaccaatatatataaaactgcctttgcaaaaattgtaagagaaaattctgaccaactccatcttgcctttaacctccaaactgtccttggtcattcctgggcataagtcagactaactttgggagacaatagctcttcccaaaaatgaaaccacccttgtaaaactaatgaaaggctaccaggttaggaaaatcagaggggcctgaattctactaaaatgtaggtgcagttaaacaattaccagccattattccagaggtcccaagatctccaacttccccagctcctcctatgttaattactatgttaatggtaattaacatcactattgtggaatctaagacaggccttttgagatatcttttcaggcttttgcatttctgacaatcagatggccccacccaacctgtgactcaaacagtcctgttgcccccacccagaagcagactcagtgcatgaggaccattttcgtcatccctatgattgcattccccaaccagtcggcagcacccattccctagttccctgcccaccaaagtatctttgaaaaaccccagcctccaaatttcagggagattgatgagtaataactccatgtccctcgtggcatggccagcctctcatcaaactttttctttactgcaaagccatggtctcagtggattgattttttctgtgcagtgggcaggaagaaccgatcaggtgaatatatatatatatatatatatatatatatatatatatatatatatatataaaataacacaacaggaatcccacaggtactgagttcttttttttttttttttgagacagagtttcactcttgtcatccaggctggagtgcagtggtatgatctcggctcactgcaacctctgcctcccaggttcaagcaattctcctgcctcagcctcccaagtagctgggattacaggcatgtgccaccatgcctggctaattttgtatttttagtagggatggggtttcaccatgttggccaggctggtcttgaactcctgccctcaggtgatctgccagtctcagcctcccaaaatgctgggattacaggcatgagctaccgcacccagccagggttctcaaagctctctctccacacttctagcttccctttatcctttgaaggtgctttgccccaacaattcccttgtaagtcttatcctattgttgtatcttctcttcaggggacacctgcactgacagaacatgttatatgttggtttggggcaaaatatgattgctagttgtcatgcttacacataatttgctgtcaccatatgaactggagaaaactccttccctatacctttaaaatgcttgtccacttccacttggaaactgaatggcaccaatgccaggctagtggttttagaaagtggctctccagatctaaaatgttttcatggataaaccccctgtgtccttgtattcccctactagctttttaaactcttctgatttccaccaaatagaagttgcatatggaaatatgcagttagatgggccacctgactccaattgcagccctcagtccaccatctgaaaaagctcaggagatctcagaattctcctagtctaaactgacccttttattataattattttttcttgagatagggtctcactctgtcacccaggctgttagatcaatgcttcaaaacatagcttcctctgaatctgcagtacaaaagatgttctgctatgtctatttctgatagcctcttcctatactgatactttctttactagcatatatagattgcttgctttaacaattcaaccgaatatttgataacatcaaattaatttaactctatcacaggttgggtttgcaggcaagcagacattgagatggaggttatcacacagggcaattatttggaatggctcttggcctcagtacctggggaaggtggaggaagtaaacaggattgggcagagggagtagacatgttatgcattcacaacaaaggcctcagccaatcccacaggaagctctgtatctgtaaaagaccttcaatgtggtcccaagttgggagggaaccctagcttttatgctgtcacattaactagtcaatgaatgtgggcatcctcctgccaaaagggcattgttctgaccacttcttcatggaacatcttcctgtgtctccaaattgtggggaaaagaaagagagatcagactgttactgtgtctatgtagaaagaagtagacataagagactccattttgttctgtactaagaaaaaccgttctgccttgagatgctgttaatctgtaaccctacccccaaccctgtgcttgcagagacatgtgctatgttgactcaaggtttaatggatttagggctatgcaggatgtgctttgttaaacaagtgcctgaaggcagtatgcttgttaaaagtcatcaccactctctaatctcaagtacccagggacacaatacactgcgaaaggccacagggacctctgcctaggaaagccaggtattgtccaaagtttctccccatgtgatagtctgagatatggcctcgtgggaagggaaagacctgaccatcccccagcccaacacccgtaaagggtctgtgctgaggaggattagtaaaagaggaaggcctctttgcagttaagataagaggaaggcacctgtctcctgctcgtccctgggcaatggaatgtgtcagtgtaaaacccgattgtatgttccatctactgagataggagaaaaccgccttaaggctggaggtgagacatgctggcggcaatactgctctttaatgcaccagatatgtttatgtatgtgcacatcaaagcacagcaccttttctaaccttgtttaggacacagagacatttgttcacatgttttcctgctcaccctttccccactattaccttattgtcctgccacattcccctctccaagatggtagagataatgatcaataaatactgagggaactcagagactggtgccggcacgggtcctccctatgctgagcgccggtcccctgggcccacttttctttctctatactttgtctctgtgtctctttcttttctcagtctcttgtcccacccgatgagaaacacccacacccagctttaaaatttctccttttgtactctttccctttatttctcagaccggccaacacttagggaaaatagaaaagaacctacgtgaaatatcgggctgaatttcccccgatacaaatcacttattccctcgcctcctttaaatatttgcttaagtatcatttccctatgagagcaaccctaccccctccattccctactggagtccctcctactccacaggcttctcatcactgggttctgctcctcctgtttcctttcctattgcacttttcaccttataagtcactacgtaacttataacataagtttttttttttttttttttttaattgatcattcttgcttgtttctcatagagggggatttggcagggtcacaggacaatagtggagggaaggtcagcagacaaacaagtgaacaaaggtctctggttttcctaggcagaggaccctgcggccttccgcagtgtttgtgtccctgggtacttgagattagggagtggtgatgactcttaacaagcatgctgccttcaagcatctgtttaacaaagcacatcttgcactgcccttaatccattcaaccctgagtggacacagcacatgtttcagagagcacagggttgggggtaaggtcacagatcaacaggatcccaaggcagaagaatttctcttagtacagaacaaaatgaaaagtctcccatatctacgtctttctacacagacacggcaaccatccgatttctcaatcttttccccacctttcccctctctctattccacaaaaccgccattgtcatcatggcccgttctcagtgagctgttgggtacacctcccagacggggtggtggccgggcagaggagctccttacttcccagtaggggcggccgggcagaggcgcccctcacctcccggatggggcggctggccgggcagggggctgacccccccacctccctcccggacggggcggctggccgggcgggggactgaccccccccacctccctcccggacggggtggctgccaggcggagacgctcctcacttcccagacggggtggctgccgggcggaggggctcctcacttctcagacggggcggctgccgggcggaggggctcctcacttttcagacggggcggttgccaggcagagggtctcctcacttctcagacggggcggccgggcagagacgctcctcacatcccggacggggcggcagggcagaggcgctccccacatctcagacgatgggcagccgggcagagacactcctcacttcctagatgggatggcggccgggaagaggcgctcctcacttcctagatgggatggcggccgggcagagacgctcctcactttccagactgggcagccgggcagaggggctcctcacatcccagatgatgggcggccgggcagaggggctcctcacatcccagacgatgggcggccaggcagagacgctcctcacttcccagacggggtggcggccgggcagaggctgcaatctcggcactttgggaggccaaggcaggtggctgggaggtggaggttgtagcgagccgagatcacgccactgcactccagcctgggcaccattgagcactgagtgaacgagactccgtctgcaatcccggcacctcgggaggccgaggctggcggatcactcgcggttaggagctggagaccagcccagccaacacagcgaaaccccgtctccaccaaaaaaatacgaaaaccagtcaggcatggcggcacgcacctgcaatcgcaggcactcggcaggctgaggcaggagaatcaggcagggaggttgcagtgagccgagatggcagcagtacagtccagcttcggctcggcatcagagggagaccgtggaaagagagggagagggagacgggagagggagagggagaccttctgaggactgtcaacataagttataacataacatatataacataacttgttatgttatattgtatataacataacttataacataacttatagcataagttacatatatgtaacataggttacataacttataacaccttataagtcactatgtaacttataacatttcctttattatttattgtctgcttctctcaattcaaattaaggtagataaatttctttgttcacacatctagaaatgcatctgcaacagggcgggtgctcagttagtatttgttaaaacacacaggaaccatggctttacacctgtttactctctctaaatcaaccctcaatgattcctttccctccacatttatgattgttcaatgttatcaggaagagaaataaatcataatttgaagaaacaaaaatttaatggtagccacaattatagtagaaccattacctcaactgaattcctcacatctcagaactcaggattctgtacttacctcccactgggacgtatcttttccaggcatcacagataattttcttctccagctatcttatgattctttttgtataatttcattaatcaacattaacagccttctaggaattgctcacttcacaaatgttttttggaggtaatctcagttccctatgaagactctgtctctgcacttccagatgagaggaaaatcactcccagaaagagatgagacaatggaatcccaagcctttatctcagcgttcggatgacctctcttgacaaatgcacaagataatacaactgcggccactatcctagttggaaacacaatttggtaagtggttattcttttcagataaacgtatggaacttagacgaaatatatttcaggaaatgcagtgagaaacattataagggggaaagttctgctctcctagattagaacatcactgacagtggccagagaaagtttcctgagggatcagggactgtcattttccactggatgctcagattccagctgtagggtttgtgagtatccttcctccctcttccatgagacagcctcatctgaaatctccaatttacctctgacgattaaacacctagaccctcactatagtcacacaagtcttcactcaaaacacaagggcatagcagtaagattgcgatccttagctgtcatctatggagtgatcacttttgaggggcactttttgaataaatcatttcaaaatcatttcaaaaattttctcaaaaaaaaaaccctatgatttaaaaatttctttgacattctaagtattctactaatctattttatttctacccaccatggaacccacatttccctctgcaaaatacaaatttctattgtattcacccctcacccctgaacataaatttatcctcccaaacaaatttctgcccagatgacattttgacggctatttacacatccccatctcagagagcacattgtacataatttggcccttaatgcagcctctatgaaaagtcctttaatcaggggactagatgagtccttatttgtcttgaatgtctctagttcctccaggacagaagtgatcagtgaccacagccagttcaggaatcacaggatattgcaaatttgtctccgattgacatgaattgggtggattctcactccaggtctatcaccttcttatttgttaatgaaatatttgtcttcagacattgtaatagatacccaatgagtttcagagggtttgaaaatgaacactttagacatgaatagcctatatggtgaacttacagaggcaaagcgactggtcaacaaacagctgctctaccaaaaaagcctggagttacaaagcagatgaacatttttgcagagctggaaactaattccaataaggctaaaaacttgctactgctggtagggaaaatcctaactattgacagtcaaatgcttttgatgcgaggctacttaggttgatgttgataagagaaaagttcccttgtccccctggcagggcgtgcgatgggggtgtggctcgcttcttcagtgtcccgctgctcaaacctccaggggagtatacagacgggcgggctgtggggctctgaccccatggcagtgtctaggggtgaatgtttatagctgaagccccagtgggcgtgttacaggatgctctttagctgtccgcaggcggcttatgttagtcaattcaattagatccctgcgttatcgcaaggacagagggctttcatatcccggggttcctgtcttggtgtaccagaagaatcagatcacacatgggcttggaggatgactgcagggttttgagtggaagtagctctcaacagttgggggagccagaagggaaatggttttcccctggaatcgggctgctccgcagcaccggctctccttggactgccccagccaaactccgcgtccttctggtgggtggcctgcccgcgtgccagcgtctgtcatgtcttcttccgccaacatgttcctctggatgtccagcggcttgtgtgtctgcttgctagggtctcagagtatttatagggacaggatgggggcgggaacaggatgggggcgtggcaggccagggtggtcttgggaaacgcaacatttgggcaggaaaacaaaaatgcctgccctcacctaggtcagttggcacagggccaggggtggagccctagccagggaccacaccctcctgtacccagcacctccctttcccccttccatatcatttaaagggaccccgcccttccctccccagcactccccttccccacctccttatcaatgtcatcaccctggactgactccaggaatcactgtaatgtgggcttaataagaacagagctcggctggccgcggtggctcaccctgtcatcccagcactttgggaggctgaggcgggtggatcgcttgagcccaggagttcgagactagcctgggcaagatggcaaaaccccatttctacaaaaaatatacaaaaattagccaggtgtagtggcgcgcccctgtagtctcagctactctggaggccgaggtgggagaatcacttgaacctgggaggcagaggttacagtaagccgagatagcgccactgcattccagtctgagcgacagagggagaccctgtctcaaaacaaaacaaaaacaaaacaaacaaaaagcggagctgacagtcaaggtgaatttcacgtttgcctgtattcagttttagcattacataaaccaaaagaagaatgccataaaggctacaggcagctaatacagagaggtgttactggaaaaggaaccagaaagagtaaatatctcctaaacgtatgatgggacagaaagataaatgcctattacatatagttaatatctgtttgattagccttatttacattctccttttaaaaggtcttacatttagcatcttagatagaacccacaaaatttaaatatttaatagaaacttaaaattcctgtatcagaggacagaaatatatttttctcacacgtgattagtctaattgccactattaatcctattaatattctgttaaataatagcatttctgtagcgaaaagcaaacagtacggaaagataatttcaaacacctagttttcatatttttgtgttaaagtaataacatattttggtatagattatcattttttgtttgtttttgtttttgctttttctgacctggtgtgttaatgccctgggttggccctctaagaagctggccacctacttcgggcctcaggtgtcagacgccccagcttcgaggtctatggctcccagcaactcgagcgcctgcgcctgcgcattctcagccggacgggagcgcccagaagtctccgggcgccggtgggcggccttgtggactgcgccgggcatgctcggcggtgtgacggctcaggactgcatttcccagaggctgcagctatccggccaatgtagcctgaaactacatttctcagcggccactggaacgacctcaatctctgcctcctcgccagttcattgtggtcgttgacccggcagcgagctttggagttcatcgagggagaagtcagcgcccagctccgaggttggagcagccccgccgggcaacttgaatttctgcaaacgaacacagcaccgggagctctgcagacctgtgtcggcgcggaacccggactgagacatgcgtgagcgttgggtggaccgggcgaggatcccgggccggcgagtgcgggagcggcagggcagggagggtgcgtcggccggggccggtgtgcatccgcgaagactgggtgcatggcctccatgcgaacctgagctattaatatttgttactattttggataaaatcactgtaattgatttatgtaaaggagcaaaagactcttcaactctcagtttaaaaaggaaacgatagttatgataccttttgcatgcagcgggaagaaatgggattgccaggaagcctcttcttgtttggaaaaaactgtataaagtatttacaccttttaaagatgagagcaatgtcatctgaaaattatcagtgcagggaaaaggacttcaaaggatctgttgtgcagattacttaactaatgacaaaattatgtaagaaaggagagcaagatgacagctgtaaacatttccatcaatctccatattgcacagaaataggacccagctttttcttaaggttcttcaattttgcattatcccacagcagtagctctctctctctagctgctaggggacagaggaaattgaaatgtcagagaatcttttctgttggttttttatttgtttgtttttaaagaagagttgctcttaattttttagttagaattaaaagaaagcatgccagagaaacttacgttttaagtaaaaagtggaaacaggtcgggtgccatggctcatgcctgtaatcccagcactttgggaagctgaggcgggtggattgcctgagctcaggagttcgagaccaccaacatggcaacatggtgaaaccccgtctctactaaaaatataaaaattagccaggcatggtggcgtgcgcttgtagtcacagctacttgagaggcggaggtgggagaagtgcttgaagctgggaggcggcggaggttgcagtgagtggagatggcaccaccgcaatccagcctgggcgacagagcgagatcccttctctaaaaaaaaaaaaatatatatatatatatatatatatatatatatatagatagatagatagatagatacataaattaaattaagtggaaacaagtgtttaattaaaatgaaataaaggatgtataatgtttacgtaataactccaatgcagtagtgcccccttaatcggcagtttcactttcttcactttgttaccctcagtcaaccatgatctgaaaataggtgattttggtacaataagatattttgagagagaggggccatgttcacataacttttattacagtatgctattatagtt[136 bp omitted]caacatggtgaaaccctgtctctagtaaaaatacaaaaattagccaggcgtggtggtgggcacctgtaatcccagctacttgggaggctcccaggaggtggaggttgcagtgagccaagatcacaccactgcactccagcctgggcaacagagtgagaccctgtctcaaacaaacaaacaaacagaaaaataaaaatctcttatggtgcctaatttataaattaaacttaatcataggtgtgtatgtataagaaaaaacatagtatatatggggttccgtcagacatctactgaggatcttagagtgtatctc[144 bp omitted]gaaattccgtctctactaaaaatacaaaacttagctgggcgtgactatgcgcctgtagtcctagctactcgggagggaggcagaggcaggagaatcacttgaatctgggtggcgtaggttgccgtgagccaagatggcgccactgcactcactccagcctgggtgacagggcgagactccgtctcaaaaaataaaacaaaacaaaacaaaacaaaagagccaactcatgttaagcaagtattctattaacttttggggtgggttttcttattcttcaggacaaccacatgttggagctgatactcctattactattttagtgatgagaaaactgagccatattagtaactgcctgatcattttctcctatgttctctacctcccgtgtcttgaccaacctcagatttatactgtcaccattaaagaagctctggattgggtgatatggactctttcttaggcttagaacgtgggaatggagtgaggagaatctgttcaagagaagactgtgcaacccaatttgagacctagatcaacattcccaaaatgggggcctggtgggaaagcttgtgtctgattctgccttccttaagaagtgccacacctctgcgatcaactctgtacagcttagttaactggggcttgaattccactgttctccaaattttgtttgagggtgtttgtagcacagtttggaagctgaaatgaagggacaggaaggtttattaatgtatgtcattgagaacactaaagcctccttttctcctctctggattttctagcttttgaacttctcagatagaggaaccccagtgaagactgatcagttcttacaattctcaaagcatggcccatgtaagttggtgtttcttcttgaaatatggggatttttatattacgtggctattttccttaattgacctgaagcattcttcatcagaatgtaccatctaattgcctacttgattccttctgtttggcggaatgatgtcaaagtatcgtttcctccttacgaggtcctcatttctaatcggtgttcatgaattcattgagcaagttacgaagcaggtaaatagtaagtcttagctgaaaggctgtgatagagcagtggaggattgaagtcccgtggcagaagtatttgagcttcctacatccatctgtggtttgatgagtttgatctgttggcttcatctggccacacatcagaagatttgaagttttccacagagctgataagatggaattttgtattgattggtctcaatatgatgagataacatgctctatgaggcttttaagattgagtggggatgtgattatgatgtgaaacattgatatcatggttcttcttgggatgcctgagagtgatactaaggtcaattttgttatggaatgggacctgccagacttggacaacatgcatttggttctgagtcattttcaccctaatccactaactcaagaacagccaaatggccaggtgcagtggctcacacctgtaaacccaggaccttgggagccccaggtgggaggatcacttgagcccaggagttcaagaccagcctgggcagcatggcaagaccctgtctctaccaaaaaaaattttttttaattagccaggcatgggggcacatgcctgtagtcctaactacttgggaccctcagacagaaggacacttggagcccaggagttcaagattgcagtgagctatggtcatagcactgcactacagactgggcaacacagtgagactgtgtctcaaaaaaaaatttaaaaaaacagcagccaaagtattaagtgaaggatcttgtatgacactatcagcatattgttatcagtagtagatgaacagattaccagaactggggaaaactgaggcatttgttacagtcttcgtttataagtataaaatcattacttttttttttctttttttcttttttttttttttttgagactgagtctcgctctgtcacccaggctagagtacagtggcacaattttgactcactgcaacctccacctcctggattcaagtgattctgctgcctcagcttcccaagtagctgggattacaggcacatgccacaacgcccagctaatttttgtatttttagtagagatgagtttcaccgcataggccaggctggtctcgaactcctgacctcgtgtgatccacccacctcagcctcgcaaagttactaacctttaatacagatccacaagataacttttatgtcactttggaaaaaagtatttattaatataaggaaaaacacttatgatctgacataatgaacttgaagcttgaggagttattcaacaaatttgtgtcatggctattttctaagacagattttattctacagttggagaaaggaatcatagctattttcttcttaaagggaaagtaatatagagactaattgtttttgagaatttgtttcattggatacctagcaggccatatctttgtatgtactcttttacttaacagggaaactaggattcttttatccatttcaccacaaatctggagtattatgataatcctacaatatataggacattttgtccatagcagcaggattcttccagaacatgcagataccatgctcatccacttgccacatcataagcttccagcctatgtgattgttatgttattgctcccttactacactgaaacgttttattccctctcctttcaccttgaaagcattttctttgattttaccagaaatatgtgggtttgcagtatcacggatcagtgacatttgaggatgtggccatagccttctcccagcaggagtgggagagtctggactcttcccagaggggcttgtacagagatgtgatgttggagaactacaggaacttggtgtcaatgggtaagtgtacttctctcaaataattgagaatctgctccctgttatactttctcctttgcagattttagggctagcttaagaactgaacacgatttcttcttgttgccagagaaatgatttgagctttgttaggttggaaatgatccagtggcaggattagaattctggattgtctattgcaaaacattgacaaaagaggccaggttttctattatgtttttgctctaaattgctctaaatgctctgtgaaaatctgacccaccttgcaggcagaacagctagacaaagggtcttgatttgttctatctgaagacctatacaacttatatgccggcggattggataaacaaatcatttaaaactgaagttacctcattttatttcatataaaataatctgattttgtggttaaaattcatcatctctgaactttgcatttaagagtaaatgcaaattaaatctatatcctatagatatagatgtctaagcagactttgtttttgtcttagcaaaataacaataataatgttattaacacacagcgtgcttactgtgtgctgtttcactgttctctgctctttatattaatatacatttgtattaactgatttttaaccttacaagcactctataggtgctaaccattttaggtgagaatgctaaataaagcacagtgtgtttaagtgagttacgcaagatcacacagcccataggtgacggtagcagaaacttgaacccaggcacttaggttccacaatccgcgttctcaatcacaatgtcatactttctttttttttttttttttgagacatagtctcactctgttgcccaggctggagtgcagtgtaatgatctcagctcagcgcaacctccacctcccaggttcaagtgattctcctgcctcagcctccctagtagctgggattataagcgtacaccaccacacccagctaatttttgtatttttgatagaaacagggtttcaccatgttgaccaggctggtctcgaactcctgacctcaagtaatctgcccacctggcctccaaaagtgctgggattacaagcatgagccaccgggcctggttttttatcaagacacaaagaataaatgagtatacacttatctatatttataatagttagatagatagatagatttcatttaaaataaaacctttcggctgggtgtggtggttcatgcctgtaatcccagcactttgggaggccaaggtgggcggatcacgaggtcaagatatcgagaccatcctggccaacatggtgacatccgtctctactaaaaatacaaaaattagctgggcgtggtggcacatgcctatagtcccagctactcgggaggctgaggtgggagaattgcttgaacccgggaagcggaggttgcagtgagctgagatcgcacactgcactgcagcctggcgacagagtgagactctgtctctacataaataaaaccgttctctacctgtctggaattatgaatccccttgcccttctcgtgtctgagatataaaggtcaatatcgtttgacctttcatttatggcaaatttaaccaaagctggaagtatttttgaactcatattttatttcttttctacattcttatctcataagcaggacattcccgttctaaaccacatgtgatcgccttattggaacaatggaaagagcctgaagtgacagtgaggaaagatggaagaagatggtgcacaggtgagtaagagcatggcaggtagggaggccattgttgctggaaacagcccagctgtcagggaggaagtgcatctctgcaatgtttggaggtttcccttcaaagccctagggcctgggtggaaaaaggctgagacttgggtaagaaataaatatctcaccagcctcacaaaaggaacttcatctttacttattttaatactcactcacctcttgtttccctctcattttattacggacttaagtcactttcccagtgcattattccatctgtgtattgaatttcacttctttcacctcctcttttacatttggatttattcatatattcttagacagtaatagttgaacagagacaggaaaaatgagggttcaggccttgtaattatgtaagacatgccaagcagagggaatagcagatgtggatgctttgggtgggaatgagttttgtgtgcttcaggagcagtaagtaggctcaggcagaattaatgggaggagtaagaagaaaaaagctagagtgctagcaggaatttgaatttgtttgttttgttttgtttttgagtgagacagtcttcttttgtcacctaggctggcatacagtggtgcaatcatagctcactgcagcctcgaactcctgggctcaagccattttcctgcctcagcctcctgagtagctgggactacaggcacacaccaccacacctggctaatttttttaatcttcagtagagacagtgtctcactatgtggctcaggctggtcttgaactcctgggctcaagtgatcctcctgccttggcctcccaaagtactgagattacaggtatgagccatcgtgcctggccaggaatttggattattttctaatgtaactagaaactatgacctaatttacatttttccaatttttgaattttagaaaattctaataaataggaaacagataccagaaaaaccatattaaaatgtacagcttgatgagttattatgaggcagatacctttgtaaccatcactctggtcaaaagataaaacatttttacgggggctgggggacaacaagagggcgagcattaggacaaatacataatgaacacagggcttaaaacctagatgacggattgatgggtgcagcaaacaaccgtggcacatgtatacctatgtaacagacctgcacattctacacacatatcccagaacttaaagtaaaataaaaaatttaaaaaacaggccgggcgcggtggctcacgcctgtaatcccagtactttgggaggctgaggtgggtggatcaggaggtcaggagatcgagaccatcctggctaacatggtaaaaccccgtctctactaaaaaaatacaaaaaattggccaggcgtggtggcgggcgcctgtggtcccagctactcgggaggctgaggcaggagaatggcgtgaacccaggaggcggagcttgcagtgagccaagattgtgccactgcactccagcctgggcgacagagcgagactccgtctaaaaaaaaaaaaaatttttaaaaacaatttttataaaataacgtcaggcttacaaaaaagttggaaagttgtactaagaattttcatatacccttcaacccagattctccaaatgaagagagaaaactcttctaccttcccttaaggctttcatgccctgtacctaatcacagttacctttctccctccctgattaatcacctctagccacttcaaactttgccagggatcccatattctcactcccagtcttacctgctcttctcaagtcagcctgctatgcttatggacacctggttattttgaggttctcaggtctgtcagacaccccacattgtccccctctgccttttcctgcacagatgcctagaccacacaagtcttagctgtagtattttgtctttgtctcctagaattttgccattttgagggtacctcttcatgtagttttgttgtatatgttgtctatagtttttttttttttttttttttttttacagttttgctatcctgtttgctctgtttttatgggggtatttgtttaaattcaaaaacaatgctaccacttccaccattgtggtagtccattttcacgctgctgataaaacatacccaagactgggtaatttataaagaaaaagaggtttaatggactcacagttccatgtggctgaggaggcctcacaatcatggcggaaggtaaaaggcacgtcttacatggcagcagacaagagagaatgagggccaagtgacaggggtttccccttagaaagccaacagatctcatgagacttattcactaccgtgagaacagtatgggggaaaccgcccccatgattcaattatctcccaccaagtccctcccacaacacgtgggaattatgggagctacaattcaagatgagatttgggtggggacacagccaaaccctatcaaccatcatcctagtttatgtttttagataattactccaggtatttgtagtgggtagtctgaatgggggcaagagcagtgcaagctgggggtctgagtggttttgattaggatgttaatggtggacagcggtgagaaggcagagtgttcatcatacattttaatgtaaaacccacaacatgttggtggattgtaaatggatatggaggcaaagagggaaatcaagaaggatcaacaggtttggacttgagcagccgaatggtggtacggtcacgtgagatggtaaagaaggaagggcaagttgcagggcagatctaaaggtgtctgctttccatatgttaagttggagatgactcctgctcatccaagcaaagatgccaagtgggctgtggaatatgcaagtctggagctcagggagagtttaggcttacacatgagaacttgggatgcagctgtgcttggtggctcatgcctggaatcccaacactttgggaggccaagttgggaggatcacttgagcccaggaatttgagaccagcttgggcaacatagggatatcccatctctatataaaatgtacaaattagctatgcatggtggtacatacctgcagtcccagctacttgggagactgaggcaggaggatggcttgagcccaggaagtcaaggctgcagtgagctatgatcgcaccactgcactctagcctgggcaacagagaaaacccctgtctcaaaaaataaaataaaattgggattcattggcatttggctgctatttaaagccatggcactggctgaggtcccttgagagtcagtgcaggtagtgactatttttttgtctttgtttttgtttctgtttttgtttgagacggagtttcactcttgttgcccaggctggagtgcagtggtgcgatctcagctcactgcaacctctgcctccctggttaaagtgattctcctgcctcagcctcctgagtagctgggattataggcacctgccaccatgcctgactaattttttatatttttagtagagatggggtttcatcatgttggccaggtcggtttcgaactcctgaccttgggtgatccacctgcctcggcctcccaaaatgcagggattacaggcgtgagctactgcacccggccagtagtgactactcttaacatttagaggtcttctagaggaggctgcaaaagagactgcctcttttaaggtagaattaaaaccagaaagtggtgccaccaaagacaaatgaagaaagtgtttcaagatagaagagtaggccagacacagtggcttattcctataatcccaacactttgggaagacaaggcagggggaatcacttcaagccaggagttcgagaccagcctgggcaacatagcaggaccccccatctctacaaaaagtttaaaaattagccaggcatagagtcatgcccctgtagtcctagctactcatgaggctgatgcaggaaaactgcttgaacctaggagttcgaggctgcagtgagtctgcgctccagcctgggtgacagagcaagaccccatctcttaaaaataaaaaaaaaaaatagaagaatgatcacctgaaaagtgaactaagctaagcagtgatgagaattgaccacaatatatatatattttttcaagacggagtcccactctgtcacccaggctagagtgcagtggtgcaatctcggctcactgcatcctctgcctccaaaatacaaatgattctgcctcagcctcttgagtagctgggactacaggcgcctgccaccatgcctggctaatttttgtatttttagtagaggtggggtttcatcatgttgtccaggttggtctcaaacttctgacttcaggtgatccacccacctcggcctcccaaagtgctgggattacaggtgtgagccatggcgcccagtctgaccacaatatttagccttgctaaaggaggaaattttcaggggcacctaggggtgaaagcctgactggtctggtaaaaacagaatgggaggcaaggcagtgccaagaatgagcacagcagtcctcttgaggcatttggttctgaagagattttaaaaaataataataaaaaaataaaaataaggtcacattctgaagtatcgggtggacaggagtttgggggacactgttcaaaccaatacaccttgtatcctatcagtctccttatattactttgaggattttcttttttatttttttataatacctcttaatatctagaagtattataccattcttaaaagtctggatttgggaactttttttgcattttgccaactgagttaaaaactccataataatcttcacctagattcactagttcttaataatttaccactttgctctatatctatatatataaaaattttttgccgtaccatttaagttgtgcaattgcaagactttattcctaaatactccagaaggtactaagaattaaggatatgattcttgatagtcaaacacacgaaaacccatttcacctgcagtgcccaccggaggttcatcttaggctcaactgcgcattcagactaagactgcctgtggttgtcttggctctatctgtttggaaaatgccatagcaggaaccccagcttgccagcggggcagcctcacctgttttgtcaggctgcatccttacagtagttcacgcaggatacactcgcatagccctccaaaagtaaggtgcagagagacgagacacacaccaggtgagttggcgagctgccgtgacttaaagaagatacaagcatttcacagaactcagtacccttagcaattccacgggcatggtttccagggtccccacagaagacgtgccatttaaaagagattctacatttagggaagctcagagtatggagctgccatcaggtacttagagttccactcagtccacatgcaacttacctatcagtgtcttgtctcccctcccctcccctcccctcccctcccctccctcccctccctccgctcccctccctcccctatcctcttttctttcagatggagtcttgctctgtcgcctaggctggagtgcagtggcgcaatctcagctcgctgcaacctccgcctcccaggttcaagcaattctcctgccttagcctccggagtagctgggcttacaggcatgcaccaccacactggataattttgtatttttagtagagatggggtttcaccatgttggccaggctggtcttgaactcctgacttggtgatccacccgcttcggcctcccaaagtgctaggattacaggcgtgagccaccgtgcccggcctaacttctgtatctttagtagagatggggtttcaccatgttggccaggctggtctcaaattcctgacctcaattgatctaccctccttggcttcccaaagggctgggattacaggtgtaagccaccatgcccagcctaaaagctaatttttttaaaaaaagacatgcaggtgatgtgtccagacttttttcaagctttcaaaggtgtgcaggttttcgagcaacacagtaaggatacggaaggatgccacagcgttatttcactactgcatcatctttctaggcagtgccatcattcatccactttcctatttagtctttcttttttcacatgcttgggcataattgacaaataatgatgaaataacttaggatgatgagacggaaaaatgttcccaggaaatttattcttacacatgattcttactggaaaaaataagattactgtctcgtagtagattgtagttttataaaaaggtgtagtagagccctaattgtaaaattgaatgaaatttagtatattttgaaaataagtaagttttctctttgttcttttgaaggcctttaagaaagactaaatgtcatgaaatactaattcttacaaatagttagaattgcttgaaaaagaaactcaaaaactaaaaattgaccccatgggccctgatagaatactgaaggttaagacaggttcggggaggtatgctggtctcagttttctttaacacagagataggggatttcgttgatttctgttctcagtgtcccctgtctcctttttggtcatgcttcagccttatctgaagataggccgttatcttcttgggaccatgattatccaaatgtacacaactatgtcatttcaacctccaaaagttttttttctgttcttttatttcaaatatcatttggagctgggcacggtggcacacacctgtaatcccagcaccttgggaggtcgagacaggcagatcacctgaggtgaggagttcgacaccagcctggccaacatggtgaaaccctgtctttactaaaaatacaaaaattagctgggtatggtggtgcacatctgtaatcccagctactcaggaggctgaggcaggagaatcacttgaacccaagaggcagaggttgcagtgagctgtgatcgtaccacagcactcctgcctgggcaacagagtgagactccgtctcaaaaaaaaaaaaaaaaaaaaaaaaatagaatatcatatggattatttgacaagaaaatggttgcacaatagcatttatgactctaggcatttgaactctagagtatagacaaatcctaagagaatagttacgatcagaatttatagttcagttctaggccaggatcaaagacttgtacacaaatgcaaccacatgaacagatcccatccctaatccaaagagcccacagaaccagatatggaagaattatcccaattatctaatttcctgatttcttatgtctttcctaaatcattttagagtttttaaagatttcagaggtctttagagatgtgagtacaacattcttctcataagaataatatttcttgcttgaaaggcacggtactttttctaaacaatgtattttgaaccagttgcctatccagtttcatggacatgaatttgtgtctttgtgacattgtccagatctgttatcgggattacaatgctaatatggttctccccattttgagggtcctcttgtgtagcgtgacattaaaaggcttggaggtagaaggaaacagtccaaagttctgtttcagtggtgactgaagttttgttttgttttgttttgagatggagtctcactctgttgcccaggctggagtgcaatggcgcgatcttggcttactgcagcctctgcctcccaggttcaagtgattctcctgcctcagcctcccaagtagctgggattacaagtgcccgccaccatgcccagctaatttttgtatttttagtagagacagggttttgccat[133 bp omitted]ctcctctttgaattaagttatctaaaggtctctttttctgacaagggggatgaatgggccacagtgatcctaggagataacaggaaccatcctaaaggcaggtattgagttcagtgagttaacatatctaatccagttttgcagttggtttttgtgtacaaacccagtgctttagtggccaccccagtgatctcgtcctatgggcttatcaaataatatggcaatattttaaaaggtggtaaacagttttgtctcaatatatcaaaggaggcaatgtgtatcttatcagcagatatctaatgtctggccgtgctcctcattaaaagactgtttactagattacagtgataatggtccaaccccacattattgagtatgtttctccttgtgactaaacaataatctgtgtgatcttagtttattctcaagaagtacacgtttattcagtttagcagtatatcttgtcatggttttaacaacaaatgataattctcattggaattataaaatatcattctttgtatggagatattttattacgattatttcttttgtatagaaggccggactcattggctcacacctgtaatcccagcactttgggagggtgaagtgggaggacgacttgagcctaggaattggagaccagcctgggcaatgtggcaagaccccatctctataaaaattacaaaaaaattagctggacatggtggcacacacctgtagtcccagctatccaggaggctgcggtgggagggaatcacctgagcctgggaggttgaggctgcattgagctgtggttgtgccactgcactccagccggggcaagagtgagatcctatccaaaaaaaaaaagaaaagaaaaaaagaaaaagaaaaccagtaggaaaccaaagaatgaagtgctagaaagtaaagacatggacgtccttagacaaagttagcagtttaccatattcctgataaagtgacattttattttaaacatggataggataagaaagctccagtctacaaacaaaacatgccagaagatttttaggcgatgatgccacctgcacatggaaccaaaaggtgagaaaatttgtaagaacgtcaaggtgctaaaagggggaaattaggtcagtatgggacagagggagttgtgtcttgatatgaggtctgagaggtgagcagggacaatattatctgtggaaagatacatggattttaatgtaagcgccacaagaaacccctagaaggaacaataaaatatggattataaaaatttcatctgcatcagaaacatttgttagaaaggttgacagtattgatgtccaggaacttcccctatgtctgattcagaggggcgggatgctgcttgaacatccattttttaacaggctcttcaaagattattatccacacctaaatgaaaactgtttcactaatcaccaaccttactattttacataaacacttgttaatctctgcattcctttttttttttttgaatttcataatggtgttttaatattactgagctatttatttctagttggtgttattttcagtttttctcttttcttccctagaattttttttcaaatagaaaaataagatatttttaaaattttctttcagatttgcagttggaagatgatacaatcggctgtaaagaaatgcccacctctgaaaactgtccatcttttgctctacatcagaaaataagtagacagaaaccacgtgaatgtcaggaatatggaaagaccctttgtcaagactcaaagcctgttcaacatgaaagaatacatagtagtgaaaaacccaacagatgtaaagaatgtgggaagaactttagtaatggacatcaactcaccatacatcagagattgcatgttggtgagaaaccctataaatatgaaaaatgtgggaaggcctttatcagtggctcagcctttgttaagcatgggagaattcacactggtgagaagccactcaaatgtaagcaatgtggaaagactattagtggtagctatcaacttacagtacataagagtattcatactgggaagaaaccatatgagtgcggggaatgtgggaaagcttttctagtatatggaaagcttacccggcatcagagtactcacactggtgaaaaaccctttgggtgtgaggagtgtgggaaggccttcagtaccttttcatacctggttcaacatcagcgaattcataccagtgaaaaaccttacgaatgcaaagaatgtgggaaggcctttagcactagctcaccccttgctaagcatcagagaattcatactggcgagaaaccctatgaatgtaaggagtgtgggaagtccttcactgtgtatggacagcttactcgacatcagagtattcatactggtgagaaaccttttgaatgtaaggaatgtggaaaggcctttagacttagttccttccttcatgcacatcagcgaattcatgcagagataaagccctacggatgcaaggaatgcgggagaaccttcagtcgtgcctcatatcttgttcaacatggaagacttcacactggcgagaagccctatgaatgtaaggagtgtggcaaggcctttagtactggctcataccttgttcagcatcagaggatccatactggggagaaaccctatgaatgtaaggaatgtggcaaagcctttattagtcgccatcagcttaccgtacatcaaagggttcatactggagagaaaccctatgagtgtaaggaatgtggcaaggccttcagagtgcacgtacatctcacacagcatcggaaaattcatactgatgtaaagccctatgaatgtaaggaatgtggaaagacttttagtcgagcctcgtaccttgtacaacatagcagaatccatactggtaagaagccctatgagtgtaaggagtgtggcaaggccttcagttctggctcataccttgttcagcatcaaagaattcatactggggagaaaccctatgaatgtaacaaatgtgggaaagcctttactgtttatggacaacttattggacatcagagtgttcacactggtgagaaaccttttgaatgtaaggaatgcgggaaggcctttagacttaattcattccttactgaacatcagcgggtacacactggtgagaaaccctttaaatgcaaaaaatgtgggaagacctttagatacagttcagcccttaaagtgcatctgagaaaacatatgagtgttataccctaagagtctgaggagtgtgggaagtgcttcgtgtgtggctcaaacattgttgaacatcggggaatttatgctggtaggaaactttcaaatgtgaagaatattggcaggtctattctcatcttataattcataatataactcagaaaacataagaatattcctttgtcatttataggtttgtaataccaatatttatactggtggaccattcagaaaaagtgggaaacgttattacttaatggttacagcactgacagcatgaacttttatatgatgcatttattctaatgtgattgtatgaacaagtgaataaaaaaccttggacctcctaaaccactgctgaacttcaaataattcattattttttaaaaccagttaacaatgtaatgaaagcctttagccatggcactcacgttaactatcatcattgttattccactgccttgcagccagttagatattaggcactacacttatcaccttacagcattgttttaaaatggtgataatagaa[172 bp omitted]ggtgtggtggcgggcacctgtagtcccagctactcaggaggctgagacaggagaaaggcataaacctgggaggtggagcttgcagtgagccaagatcatgccactgcacttcagcctggtgacagagctagactctgtctcaaagaaaaagagaaaaattgagacctcaattaaactgggcatctgagctgggcacagttcaaatgggaggtcgggaggctgaggtgggaggttcacttgagcccaggagctcgagatcagcctgggcaatgtaaagagactctgtctccacaaaaaaataacaagtaaaatagaataaattggctatctggcacctatcagggacatgagagttccattggatagctttaccgagaacccagaattgtgtattctgggaagggaaatgtatgcctttgttattatcagtaatatctaacactgaaggaaataaggagttatttggccttgtattgtggccatagtatatctagagacatgtgtgatttacgtttatattttaggtatctgtaaggtaggagattgctagagtttttactctgaagtgcacaactcttaggcaatggcccaatagtttgcaataaatgtgaagatgaggccatttgttgaccaggtcatccagtgctaagatgactgcctgaagtttggccaattgtgttgactgctggggacatcctgtctaagatgcaaagtagcaagattccactaatttaaaaaacaacacacaaaaaatcaatatttatgatggttggcagtgtcgttcatacagtctgcaaactgctattgctgtttacttagttaatcccaagggtctccccaggtagccaaccagtctaggagagggggtgacttcttccagtaccatggcatgtggcaagagactgaggacaaaggagaccacctctcctgtagatggaatacgccagagggcccagatttggctctatcctgtattaaggaggcctcggtagccatgccaagtttgtaggttgctgtttcttgactcaaaacaaatgggcagctaagtattaggtctgtgaaagtctctatttctagaagagcctagtatgtagctagtcagtttgttttaatggaggcatagcatgattttgagaagggcagtttcttgtatcagaagcccttgggaaacttctggccatcagaggtggtctagagactcaaggacacatgagaagaggttgccaaagccttgacagtgaagggatctcttagggcgctaacaaatgtgtctgtcgatgtcaatgtggacacattttaaagactgctggggggaatcaccctgtctgatgttatgggttattatatagctaaggatacaagacactgtggtactggggagggataaacaacataggtctaaagaacagaatagataacccagaaacgtgcaaagaaatataaccaactgatttttgaaaaacaagtaaaagcaaataaatgaaggcagataaggcttttcagcaaataatgctggagcaattgaacgtccatagacaaaagatgtgaacatcaacttaatcccatactttaaacacaaattcactcaaaatggatcacagactaaaatataaaatataaaagtacaaaatgttcagaagaaaatacaggagaaaattgtcagaactgaaggctaggtttaccctaggtaaacccattaaacaaaagaaaaaatatccaaaaataagagtatcagtttccacattaaaaaactaacgaagagaaatgcaaaatgagcagaagagagtatataataaagattaaaatggaagtcaatgaaataaacagaatgaactgtgaagaaaatcagtgaaaccaaaagccttaagaacaatacaactgataaacctctagccaaggattatcaagttacaaagaagcacataaattacccagattgggaatgagagacatgacagattctacagatattgaaaggaaaatcatgaacccatttatgccaataaatctgggaaataaaataaaatgaacaaactctctttgaagacacaaaccactaaagttcacttaagaaaaataaaaatgtatatccctatatttatttttaaaatcagatttgtaattagaaaccttcctacaaagcaaactgtggcttaaatggcttcagtggtatattctaccaaacatttagggaagaaaacctaagaatgcagaaactcttccaaaaaagtggaagcataaggaatgctttccaacttaattggtgaagctattatagtgataccaaaaccacacaaaggcattacaagaaaaccgcagatcaatatccttcatgaacataggtatagaaacttcaacaaaattttggcaaatcaaacccaacaatacaaaaaaaggataacacatcaagaaaatgtagatttaccctcaaaatataaaagttcacttgatatt[140 bp omitted]gagaaaccccatctctactaaaaatacaaaattagccaggcgtggtggcggatgcctgtaatcccagctactcaggaggctgaggcaggagaatcacttgaacctgggaggcggaggttgcggtgagccaagaccgtgccgttgcactccagcctgggcaacaagactgaaactctgtctcaaaaaaaaaaaaaaaaaaaaaaaaaaaaaaaaaaaaaagactttaaaacaaggtaaaacgtgattgtagcaggtaaactctaaaaagaaccccaaatctctacttcctggaattcttacccttgggtacccctcacacattttacaagggttgatctgtaaagcccgtataaaacagaaaacatgagaacatgtaacttccaattttaggttattgaagacactggtctccttcttgggtagactctcctgctcttggatcactttctctgtttgaaagaatccctgtgacgagcatccctatggagagatccatgtggcaaggaactaaagcttcctgtcaactgccatggaaaagagattagaattgaatcttccagcctccagcaagtttcctgagactgtagctccagagacagcttaactgcaatttcatgggggattctcaaccttgacctacctaagctgcttccagattaatgtaatattctaaaatatgtaaacaaatgtagagtgacagaaagcagatcagtggtttcctaaagacgggtaggtggataaggaggaagagattacaaagagcccaagaaaacctttaatttcatggctataaacatgtaccaaaacttgtacctgtgaaatatgtgtagtttagacttcaataaagctgtttttctaaaaagaaaaaaaaatacttaaaaaaatcctcatttcctaattattttactattatctatgctttagaggttatttacgtttattgcatctattcagtggaaacagaatacaatggcgtgctattgcacatatcttcccaactccatattcagagacatcatgttgtagcttgaaattggccaagacagaagtatttacacctagggtattggtaaacactacaaaccagaacttgatctgttgttttattgaccaggtagacttaagaaagcagagaatatgttaataattcagattaaacttaaaagtgtttcatgtctctagtttcccattgtgaacagcacaaaattttgaggaaatattcttccaatattcaaaattaccctacaaaacaaataagtcactggcattattaataaatgactgcagttccaaaaaatttctttactatttcaatatcaactaatatttacttttaaaataggcaagagatatcagtagacattttaccatagaagttatatgggtggcaaataaaaacatgatttaaaatatgctcaaaatcatgaagccttagagaaatgcaagttaaaactacaataagatactattactccatccctagtagcattataaacattaaaaacacagatcatagcaattgttggtgattatgtgacgaaactggaactcttgctcacaatcagggaggcaggggatgtaaaatggtataataactttagaacacaatttggcagtttcttaaaatgtaaaatattcacctaccctgcaacaaaggcattgcacttttagataataacacaagagaagagaaagaatattcccacacaaagacctacacactaatgattacagtagctcaatttgtaacagacaaaaaccaacatgcagctaatagaagaaaaggtgggagttccagaggaaagagagaaacaaggaggaagagggactatttttaagaaatggccaaaactacccaaatttgatgaaagactttttttttattttaacacactatacagatgtaaaaagacataaatataaacacccaagaagctcaatgagctccaagaaggatgaattcaaagagactcacgctgaggcacattataatcaaactgtcaaaagacagagacataaagagaatactgaaagcagcaaaaaagaagtgactcattacattcaagggatactcactaagattatcagatttctcatcagaaaccttagagggcagaagacagaaggcagaaggcagtgggctgacatgttcaaagtgctaaaagaaaagaacggacaaccaagactcctaaatctggcaaaactatccaccaaaactgagggagaaatgaagacattcccaattgagggaatgcgttaccaagagaactgctgtgcaagaaatgctaaagggagtccttccagttgaaatgaaaggacactggacagtaactcagtgccatgagaagaaataaggatctctagtaaaggcaaatacctgggaaaattttaaagttcatattattgtaactttggtttgtactccactttttgttttttatgtgatttaagagacgaatgtgttaaaaaattattaatctatgtttttggacacacaatgtataaagaggtaattttgtgacattactatctacaagtgttggggatggagttgtataagatcagagtttttctgtgttattaacggtaagctggtaaaagttcaaatcagagtattacaaatctaggatgtgaaatgtaatctccatggtaaccacaaagaaaatagttatggaatatacacaaaatgaaacaagaatgaaattaaaatgtttcacatttgaaaaatcaaacacacaaaaagagagtaatataggaaataagggacaaaaaagctaaaatcacatagaaaataaatagcagaatgacagaagtaagtccctccttatcagtaattactttaaatataactggattaaatcctcagagcaaaacacagaaactggcaaaatgagttaaaaaacaaacaacaacaacaaaaaaaacaccgataatccaactatatgctgtctacaaagtttcactttagatccaaagacagaaatagattgaaagtaaaagaatggaaaaagatattccatgcaaatagtaaccaaaagaaagcagggatggacatactggtatcaaacaaaatagaccttaaatcaaaatgtggttccatgagacaaagagagacgttacatattaagaaaagattcaagacagcaaggacatataacaattataagcatttatatacctaataacagaccatcagaatatatgaaggaaaaatacacagaattaacagaagaaatagacagttctacaacaatagttagagacttcaataacccattctcaataataaataaaacaatcagaagaccaataaggaaatagagcacttgaacaatacaataagccaattagatctaacagaaaatatatagaatacacgataacaatagaatacacttgcacatgggatattctccaaaatagaccatgtcaggccataaattaagggtcaatagattttaaaagatatatatcatataaaatatcttccctgatcacaagaggttaggaaaacttgaaaattcacaaatttgcagagagcaaatgacactcttaaataatcattatatcaaagaaatcacaaaggaaattataaaatagagatgaaagaaaaggaaaacaatatacaaaaacttgtaggatacaacaaaagcagtgcctaagtaggaaatttatagctataaagattatattaaaacagaagaaagatctcaaatcaaaaatctaactttacaacttaaaaaaacttaagaaaaactttataacttaagaaacttaagaacaactggccaggcgcggtggctcatgcctgtaatcccagcactttggaaggccaaagcaggcagatcatgaggtcaggagttcgagaccagcctgaccaacttggtgaaaccctgtctctactaaagatacaaaaattagccaggtgtggtggtgcacacctgtaatcccagctactcaggaggctgaggcaggagaattgcttgaacctgggaggcagaggttgcagtgagctaagatcgtgccactgcactccagcctggcaacagagcaaggctctgtctcaaaaaaaaaacaaaacaaaaaaaaaacaaaacaaaaaacaaagaaaacactaagccaaaaatttagcaggaggaaggaaataataaagattagagcagagataactagagaatataaaagcaatagagaaaatcaacaaaatcaaaagttggttgttaggattaacaaaattgacgaaattttagttagaaatgacaaaaaaaagaagattcaaattaataaaattagaaattaaaatgaagacactatgatagagtctatataaataaaaaaaattacaagagagctatgaacaattgtatgccaacaaattggttgacctagaatggatatattctgtgagacacaaaatctaccaagactgaatcatgaaaaactaaaaggctgagtaccatggcttatgccagtgatcctagcactttgggagactgaggcaggagaatgcgtaagcctaagagtttgagactggcctgggcaacatagagagaccctgtctctataaaaataaaaatcagctggatatgatggtgcgtgcctgtagtcccagctactcaggaagctgaaatgggaggattgctgagcccagcaggttgaggctgcagtaagccatgatcatgccactgcactccagcctgggtgacaaagcgagactctttccctctctttctcactctctctcaatgatgaagaagaagagaaagaggaaggagaggaagaggaagaagaagaagaggaagaagaaaaagaaaagaaaaaagaaaaatttgaataggcctatcaacagtaaacatagagaatcaaaaacctctcaacatgaacaacacaaaagccctgacctgacagcttatctggtgaatactactatacacttaaagaactaacaccaatccttcttaaacttttccaaaaaactgaaggataaaacacttcctaactcattttatgaagcagaattgcccttatgccaaagccagccaaacataagagaactacaaaccaatatcccttatgaacactgatgccaaaatcctcaatcaaatattagcaagccaaattaagcagcatgttaaaaggattatacaccatgtccaagtgggatttattcctagaatgcaaggatggttcaatgcatgaaaaacaatcaatatactattccatattaacagaataaaggaaaaaaccaatcatctcttttgatgcagaaaaagcatttgacaaaaattcaataccatttcatgtaaaaaaaaactcaaaaaatgaaataaaaggaaactatgtcaatgtaataaaagccatatataaaaacccatagctaacatcattctcaatggtgaaaaaccaaaagctttctgatcaggaacaaggcaaagatgtcctctttctctgtttctgttcaacatggtactggaagtcctagccagagtaattatggaagaaaagaagtaaaaggcagccaaattggaaaggaagaagtgaaattatttctgatcccaggtgatattatatgtagataattctaaagttttcacacacacacacacacaaagacttaaaattaataaatgaattcagcaaactagcaggataaaaaaaatcaacacagaaaaatgacttacatttccatacactaacaatgaacaatctgaaaaggaaatcatgaaaacagttccatttacattagcatcaaaagtaatagaatgcttaggaattaaccaaggaggtgaaaacttgtacaatgaaaactacaaaacactcctgaaagaaagcaaagacataaataatggaatgaaattccatattcacagattgggtaacttaatattattaagatgtcaataccacccaaagtgatcaatagatttaatggaatcccaataatatcttgtgcagaaatataaagatccattctaaaattaatatggaatctcaagggatcctgaacagccaaaagaatattgaaaaagaacaaagttgaaggtctcacacttcctaattttaaaacttactacaaagctacagtaattaaaacagcatgaaactggtgtaaggacagacatacacaccaacagaattaaaatggagctcagaagtaaaccctcacatatatgctcaaatgatttttgacaggagtgccaagaccaaccaatggggaaaagacagtcttttgaacaaatggtgttaggaaaatgggatatccacatgcaaaacagtgaagctggacccttacctaacaccatacacaaaaatgaactccaaaaagtgactcaaaatgaatcaaagacctagatgtaagagctaaaactataaaaactcttagagacataggtggcaatggttccttatatatgacaccaaaggcaaagacaccaaaagaaaacatagacaaattgaacctcatgaaaatttaaaattttctgatcaacggacactatgaacagagtaaaacggtccacagaatgggagaaaatatctgataaaggattagtacccagaatatacagaaaagttgtaaaactcaacaacaaaacaacccaattcaaaaatggaaataagaagccgggcgcagtggctcatgcctgtaatcccagcattttgggaggcggaggcgggcagatcacgaggtcaggagatcgagaccatcctggctaacatggtgaaaccccatctctactaaaaatacaaaaaattagctgggcgtggtggcaggtgcctgtagtcccagctactcgggaggctgaggcaggaggatggcgtgaacccgggaggcagagcttgcagtgagccgatcgcgccactgcactccagcctgggcgacagagcgagactccatctcagaaaaaaaaaaaaaaaatggagataaggaggggtgagtgaaaaaaaaatggagaaaatacttgaatagaaatttccccaaagatatacaaatggccagtaagcacatgaaatgatacttaaagtcacaaatcattagggaaagcatatcaaataagatactacttcacacccattagaatggctaccaccaaaaaaaacaaaaacaagtgctggtgaggatgtaggaaaacaaattttttttttttttttttgagagggagtctcactctgctgcccaggctggagtgcagtggcgtgatctcggctcactgcaagctccgcctcctgggttcacaccattctcctgcctcagcctcccaagtagctgggactacaggcgcctgccaccacgcccagctaattttttgtatttttagtagagatggggtttc[131 bp omitted]gtaagaatgtgaaagggtgcagttctgtggaaaacagtgtatgtcaggtcctcaaaaaactaaaaatagatttactatatcatctagtaattctacttctgagcatatacccaaaagagttgaaagtagggtcttgaatagatatttgttgtgcactcaggttcagagcagcattattcgaaataggcaaaaggtggaggcaccccaagtatccattgacacatgatagagaagcaaaatgcagcacatacaaggaaatactaatcagccctaaaaaggaaattctgacatatgctccaacattgatgaaccttgagaatattatgctaagtgtgaaataagctagctacaaaaagacaaatacttattattctacttatatgaggtacctagagtggtcaaattcatacagacaggaagtagaatggtggttttgaggggctggggaagggaaaatgggaagttattgcttgacaggtacagaatttcagttttgcaagattgaagagttctggagacgaatggtggtgatggttacataacaatacgaatctacttaataccattgaagtatacactaaaaatggttaggatagtaaatttcatgttaagtatatttcatcagatttttttaacatttttaaataaaccataaaaaactatggtgcactcacccagtatagcactactcagtagtaaaaggaatgaactatatatacacacagcatggatgattctcaagataattatgctgcatgaaagaaaccagaccaaaagagagtataaatactttatgattccaattgtgttaattctagaaaaggcaaacaaatctaaagtaaaaaatgtaaatcaacggtttcctagggaaggcaaggagggaatgtaaaggggcatgaggtagctttgcaggtgatggatacgttcattatcatgattatggtattggttccctgagtgtacataatatatgtacaaaacttaccaaatatgaataattattgcatgacaatcacatatcaacaaagcattaaaagaaactgttgcacataaaaatccaacttcctactcattttagaaaatccgatttggcaaccctatattgactctgtcatctctttcttcttgccttgggagcaaagaatggctggctacgtcatagatactacagtccctatagtataggatctgctttttctcagtccctattttcctgccagcacagcactggccttcagatgcacagcacggagatggtaatccacaaaaccaaaacctttagattatttgctctgccagtaacattagtcataggacagaggtctgaggtcctgagaatttctgcaaaccctgaatcctgcacagccacattcaagggagcattcacggatgcacatttagcagagttccatttctgctggtttgctataatctcgcctactccctattaatcacatccagtgtttctgtacaaattatggtcccagctgggcctggtatgtcttacagttaagagatacctgcctaatgctgaacttcagggcatatggctccttggcaggtgctaaacagcatctgctttacagtattggggaatatggggcaccccctgggaataagggacccaattcatgctgttcccacatgcactggaggttgtcacaactgccccctcctcgggataaaaattcacgccattcagaccacaatattatacccataaattcctacaatttttcctaggaggccttggtggcaatgcaaatgaggtcaaatctggattgacagttgtttctctgccatcctcctgtcccctccaagataatctggagaccccttcagtttggtagatcttaactctgctcttgaaccaccccacacagtgatcagaacatggaagactaaaggcggctttatcataaggccattatcatcacatgaaccagggcaatacacaggagataagttgttgtgtagagtaacatgaaggctggacaaatccttcacaggcataacatgagaccaacaatgtcccagaaaaagggaaaccttctctagaacaagctgttggcaaaaccctgctcaggtcttcacagccaaaagctggtcatgtccatggctaaaccagccatacagggcgggaatgacatcttcccaaggcttcagactactcctaattccctttagggattggaaagagagaggagaggtctgccttccctgagcacagtggagtggtggacacactctttggagagctgcagtgtgtggtgctgacatggcttctatcacaaccccagcagtgaaaaaacgctgataaactctacagtaagagaatgtaacttgtctccagaaagcttccaacacagctagcattcctagggaacctccccagggtgggtacttggatgaacaagtttcaacttgtagttgacagcgccctgataaggtctgttctcagagcttatctctggtgtgtgctgtgaacagggaaggagcacattctccatgctcctttctctgatgtgaatcttctgatgccgaatgagggtaggcctttggttgaaggctttcccacattcgctgcattcgtaaggcctgtctggtttgtgaactttcaggtgctgcctcagattggacctctgcctgaaggttttcccacattcgctgcactcataaggccgctcgccggtgtgaagtctccggtggttattgaggctggagctttggttaaagaatttcccacattcactgcactggtaaggccgttcaccagtgtgaagtctccgatggctattgaggctggagctctggctaaataacttcccacattcattgcattcataaggccgctcaccagtgtgaactcgctgatgtttcatgaggtcagagcttcggctgaaggctttcccacactcaccacacccgtgaggccgctcgccagtgtgaactatctgatgttgaatgaggctggcaatgtggctgaagaatttcccacattcgttacacttgtaaggtctttctccagtgtgaactctccaatgtttaattaggctggagttgcagttgaaagatttcccacattcactgcactcatgggcacttctgcccgtatgaaccctcttatgatgaatgaggttggaacgctggctgaagaacttcccacagtcgctgcactcatatggcttttcaccagtgtgaaccctcttatgctgaatgaggttggagcttcggctgaagaatttcccacagtcaccacacacgtgagggctttcaccggtgtgaaccctgcgatgtttaacaaggctggagtgctggctgaagaattttccacattcacagcactcatacggttttcctctattgtgaactttctggtgttgagtgaggtcagcggcgtaagtgaagaagattccacatttgctgcattcataaggcctttctctgctgtggattctctggtgctgaacaagagtggatttgttattgaaggcatccccagattcacagcacttgttatgccttagtgcaatgtgaaaatccaccacaccttcggtggcctcgtgcggctccccatcgctgggagtgacctcacactgcagaaaccctgctgtggccacaaagtccttcccaccctccctgcaggtggaaagctgatctgatgtgtggtctctgcaggtctttacaggggaagcctggccctcctccgttctgatagggttgtgtacgttctgctgcacctgtttccggggaaggtttgcactgaactcagagcctttcacatatgcctcacacacaaatggtttctgcctgggatgtgttgtctggtgttcagccaaatgcaaaatgtctttcaaacgtaggccacatatgtcacaggggcaggtcttctgggggcacagagttgcctcgggactcctgtcctgtgccactccttctacagaaacgttatgctcagaaggtaagtccttgccctctgttccatggcaaaaatctgaaagcagagaaatgctggtgaagttcgtataaactttaatagaaggaaagagccccatcacctatgcttggctgacccaagaataagcccatgggattgttggcaacacaagaaggctcaggtcagggtaaggaataatctgctccgccatactgtgcctggccaggtcacaaaatacaggaggccttatcaggaccagggacacaaggatgggggacagtattgggcagagaggcagggtctcccactcacttctctttaaaggccttttggcagggcctgggctgctggtaacctgtgagggctatgcagtgagagcatctagacccagcaaaacctgcaactgagtagctggtgttcaagcacatcaaggaaaagcacgtatctcacaacacattaagtgtaggccagtgttggaaagtgccgcagaggaagctgaaagagagaaacggaggccagaaaagtggggcacagccaaggggcccaactcagaataataatgacaagtagataatgtgtcaagcacggggaaggaaaagcagagacgtggtctggctactggcattggtatcaaatgatgatgaataggagagaagatgctggtatgatgtaaacacagtggtgaagtcacatcctcccctagctcccatcgctgcttaccagagccaggcctgccataagcccctctggccatggctgatgtcatatccacactgtcaggcacccagggctctttccccatctccaactgggaaacgatgtgggacctgaaagatataagtcctaagggaaagacagagtgggtcagtggccagcacctgcccagttgaactaccccatgatagactacaagacaggaagctccgtatgacacagggacattgggtggtcacggcaagcagtaaccacatcagtgattggaattcctggcacagtcaggcttaggaaatattagcaagaggaaaggcacagaatctaaaccacagaactgtcagatctggataatcacccaggagggaatggccgagtcagaggtagtcacacagctaaccgcaagacccctcatgcctggagcttccctgcaaggcttcaggcagcaggtgtgggggcagctcagggagaggagggaacaatgcacatagctcagccccagaagccacaacacacataccaggaaagtggggatggaagcagtgccagcggtctggctgtgggaaggaaagagctgtttcttgggcaaaggggacaggcagagaggagctcgggacaccggggtaggggtgacagccttacccagcgaggctataagtgcaaagttttccagcatcacatcgcagtacaggagtctctgagcctcatcgaggagcacccactcctcctgggagaagtaaatggtcacgtcctcaaaggtcacgcagccctgccatgatggggacagttcgttccatgatcagtctctgtccttgggactccctatccatcccctgctcactctcctccccagctccacagctccaggaggtagcaggccctggttctgtgggcgcctcatgtgaccactgtgtcagcccgcagcagcaacaggcagggtgcagagaggcaccctctaagctctgggcctgaagtccagggcccagctcgctcttctgccagcctcttcccctagtgtcaccaatgtcatgcttctcagatacaaatgtgggcttctcctttaaaccccagtccagagccctggggtgaacagctcatactccctcccacgtgcgtttcactctttggactgcaccaccctcacagctccagaccttcaccacggcctcccattgccactgctaccttctccccatcctggcccctatcctagccatctccatgggctcccacgagtcactctgcacatggcatccagagagtgcctggcaaacataagcaccatcccagcctgccccagacctttgatggcctccactgccaagggcaacacccaggtaagggggagagggagcgctccacccttgccttggagccccctagctcccctggcctggcttcaacctaagccacccacggcacacatggatgtcacatacacttggccttctttgttgcacattctgaccctgtcatcactcacactcatttaaaaaagaaaaaaaaagccaacccctctggccatcctacccccacccacctaagcccagcaactctgccaactgactcctcttgccccaagctaattccccagcctgaggacaaaccccatcaagggtcaccacagaagcctggtgagaacataggtgagtgtgtaagcaccagcccaggcctcactgcaatattacctcctctactgctaagcctcagcatccatctcattcatgtctacactctttgggatgatctggccacctgccagaccctctgatacacccacatagcccctccatcaccaccatgaccactactgttcctcacctgtctttatgatgccaaacaagccacagtccccaagcaagaaccctgctctcagttttccagccccaccttcctcttttttttaacatcattgtcaccatgacctgaagtttcacctcctaaatctcacacacagctacactcccgtccacacaccagatgtcacattttggatgtttctaactgttgaaataaacaaagaccaatgaaatgagaaaagccaaggctacttactcaaagctcactatagcaagagagactcaatgcaagccgggagtgggagagttttatagcaaaagaaaaggaaggcttcaggcgtgccctggttggaggctcctgttcgtaggtgggtgaactagaagtgggcatcctatgtgattggttagggtgcgtatctgcctttctctggttgttcttaaatcagaagcaggagcaaaaatgaggaaagctgtctgttattaatcaaaccctggccatttgggactgctcattacagaagttattgtttttacttcctggattgtcagtccagatagcaatctggcttcctgtgggtctgacagacagcaggctggcttcctgctgtatgggttgtttattgtagataagggggttggtttcctgggcaggttctggggcagagttctatttgtatacatgatctggccattgttcgaatgaatatccagtctctcattaccttaacaactccctcagaacacccgaactgtgtgttcagcggcccactcttcaactccatttgggggtctctgggacatcacaggctcaacttggccaaaacctaacttctactgcttccatggaaaattcctcctaaaaccaacttctcagttcataaagctggattcatcaaaccaaaaaccatggattcttccctcctctttctcaccctccacatcggaaaatttggtcagcttgacttaaaagacatcaagttcccaatcacttcctctacctccagtcctcactctggtccggccagccgcagcactggcctgggctattccattaggctactccttggcatccctgcttgcggctcactccatattcagttctccactgtgcatccacagggagcctgttaagacctgagtcacagcatcttcctcctctgccctaaaccttccatggctcccaacaccctcagaacagaggcccagctctgccgttctgagctgtcttcagcccacctgctctctggttccagcagacataatattaataacactgacctgggtggggttccttgaacactcccaactcagtctccacaccgtgccccaccccacccccaagcttttgcgcacgctggttcctgtgcctacaaagccctttctccctccatcccattacatttcagcaacggaagccactttatataaaccctgccctgattcaggatcctagctgggagcaactcccttccagggtcccctgactcaaaagcaaggaaatgggaaaggcgaaaagtcctagaacaaagccatcttttgcgtctcaacaccgagaacagaagcgtggggggccgacagcgaagggcctaacgtccaagcactcacctgcgcggggtcccgcagcgccgccgctgccatcggagtctgtggtcagagcagggccccacggtgcgggaaaccacggggcgggggtagggggtctcgcaggctgaggctaccacccacctggccgtgccccagacgaggtgtgaccccgggctgagggtcgcactcctagcctcagtctcccccgtgcaaaatgcgcaaggggcccggggcgcaggctccgggggcgccgagagcgcgcagctccgctgggtacccccgttgcaaggggtcacggctggtgcaaaggcgcggagggggtcccggcctcactgtccccctcgcggtccgggaaagccggcggggcagcttcacgggcgtagccccagccgccccgcccccaactcggggtccccagctcctggggactcagcctccccgccgggaaatgacctgcgaggctgcagtgcaggaagttccggcccccaccgtggcggccgggagagttgccctctcccgtactgtcattggcctggcgccagccgctggtgcacaggcagggcctggggatcgcgagtttctgcccagcctctcgtcaggctgagggtccagggcgggaaggagagcggatctcgtcgggtctccaccgccgccgcctgcagccctcgggccttccccttaaaggggccgctcccgagcctgcagccgcccgcgctaaaccccgcccaccctccgaggtccaggaggagagccccagtgctcttcctgcgcgtgtgggcatcggccagccgcttcacccctaagggacctaaattcacactggaaaatggggatagtacccaatgggcggggtctttgcgttgtaatattaaatgtcgctctgattcagggcttctcaaaccagcaacatcagcatcacctggggactggctgaaaatgcaggttctggggcaacaacttaaatctaaggactcagaaattctggggatgggattcagccttctctactttttgcggggggggcgggggggatgggtctcgttctgttgtccaggctggagtgcagtggcctgatcatagctcactgcagcctccatctcgggctcaagctatcctcctgcctcagcctaccaggtagatgggatacaggcgtgcaccatcatacacagctaattttaaaattttttgtagagactggatctccctgtgatgcctaggctggtctcaaactcctgagctcaagtgatcctctcacctcggcctcccaaagtgttgggaattgcaggagtgagccatggtgccaggcctccttctctgttttaacaagccctctggggactccaatgctggctccaactttacagcagggactctcattgaaatccagtaaataaaatgggaaaaataacactacattgttgcaggaagtcagggaccccgaacggagggacctgctgaagccgtgacagaagaacattaattgtgaagatttcatggacatttattagttccccaaattaatacttttataatttcttatgcctgtctttactgcaatctctgaacataaattgtgaagatttcatggacatgtatcgcttccccaatcaatactcttgtgatttcctatgcctgactttactttaatctcttaatcctgtcatcttcgtaagctgaggatgtatgtcatctcaggaccctgtgatgattgcgttaactgcacagattgtttgtagggcatgtgtgtttgaacaatatgaaatctgggcaccttaagaacaggataacagcgattttcagggaacaagggagataaccttaaagtctggctgcctgtgggacgggcaggacagagccatatttctcctattaccaaaaacgggtaagagaaatatcgctgaattctttccccagtaaggaatattaataattaacagccctgggaaaataatgcattcccagggcagtgcctctaaaatggctgccctgggagtgtctgccttatgcacatgtagatagggatgaaacacaccctagtctcctgcagcgcccccaggcttgctaggattaggaaattccagcctggcgaactctagtcagaccagttctctgctcttgaaccctgttaagatgtttataaatgacaatgcgtgcacagcaggacatggaagctcatgagtgattctagttttgccctgaccttgtgatctcgccctgaccttctgccttgtgatcttttgttgcccttaaagcatgtgatctctgtgacccacaccctattcgtacactccctcccctttgaaaattgccaataaaaacttgctggttttatggctcgggggcatcacggaacctgctgacatgtgatgtctcccccagacacccagctttaaaatttatctcttttgtactctttccctttatttctcagaccagccgacacttagggaaaatagaaaagaacccacattgaattatcgggggtgggttcccccgatactacatgtcatatggtgaaaccacctttgtaaaaattataactgagaaaattatgacagtgagagatctgacctaaccaactccatcttgcttctaacctccaagctgtccttgttcgttcctgagcataggcctaactaactttgggagaaactcagtttacagtttaactttgaagcaaagataacagccctttccctctaggccgggcatggtggttcacccctgtaatcccagcactttggcaggccgaggcaggcggatcacgagttcaggagatcgagaccattctggctaacatggtgaaaccctgtctctactaaaaatacaaaaaattagccaggtgtggtggcgggcacctgtagtcccagctactcaggaggctgaggcaggagaatggcatgaaccccgggaggtagagcttgcagtgagctgagatcgcctccagcccgggcaacagagcgagactccatctcaaaaacaaaaacaaacaaaaaaacccagccctttcctgaaacaaaccctcttcttgtctggggaccagactgcctttgtaggattaacaaaagccacaagattagagagtatggtttaggagtcatgcagccaggggccaggggtcacaagattttaaaccttcccaattgctactggggataacatcactattgtaaaacctaagattggtgctcgagatatttttcagacccagcactcgatggatcagctagtgccacccagattgataaactgggtcatctggtcctgtggtccccaccctggaatttactcagtgcagttagtcaactttgactccctgtgatttcatctctaacccaactaatcagcactccccactacctggccccccacccaccaaattatccctgaaaacctctgatcactgaattttcagggagatcaagttgagtaataactctgtttctcccatggcatggctggccctgtgtcagttaaagactttgtttactgcaatgccgtggtctttttgtagcaggcaaaaagaacccattgggtggttacaatggtagataacagggcccaggacagaattcctgctgggtgcataaaagctattgtcattaccaacaccatcatcacaagaatcttacaaacactgctgtggggcggcagggaagagacacctctgtgcagtcttttggatgtttgtcaaaatatacaatgactctaactcagcaagtaccgcctcagagggaatagttatgatttttacatgaaagcacaccatagtaacatttgcctacttgattttattttattattttcttatagctgcatttttttgtttttctaaatttataaaataatatataattattgtatgcaacatgatgttttgaaatatagatacattgtggaattgatagggacaggaggtagggaaattctgggcagaagaggccaggtccatcaagctgaaaatcttgataccacggcccaaagtgagaacttacatccctgttttcccactcaaatgttgccttttccaaaaccacccgtggctcaccctgccccccatcctatgcccataaaaaccccaggctcagccggcagagagaagaaaagcagctggacattggagactatggttggatgttggagagaagcaggctgacttcaaagggacagcttgacagcgtagctttggagaggatggccagggatggccaaacttcaggggacgattaccttcctgctccatccccttttcagctcctcttcctgctgagagccactttcaccggcaataaaatcccctgcatttaccatcttcaatttgtttgtgtgacctcattcctcctggatgccagacaaaaacttgggtgccatgagtgtgggtacaaaaggctgtcgcactgaccctccactgagctgttaacacttaagctatgcatggatggcaaagctaaaagggcactgtaacacttcgtcaggggcttcaggggtcacagcaccttcccctagacactgccgtggggctagtatggaatttgctcttgccagcacccaaaagccctcaccctgtctcctgcacccactcacctgtgctcccctccccatgaggggtggaacaacaagcgagtggagttcgtccctgacagcgcccatgtactctagttcccatccaagaaggggtcagggaaatatcctgcttcagaatgactaaatcaagctcattaacatatgcatcacttcacattgttttgttttgagacagggtctcattctctcacccaggctggagtacggtggcactatcgtggctcacagcagccttgacctcttgagctcaagccatcctcccacttcagcctcccgagaagttgagactacagacgtgcaccacaacacccagctagttttttgtatcttctgcagagatggagtttcaccatgttgtctaggctggtctcaaactcctgggctcaagcactcctccttgccttggtctcccaaagtgctgcgattactggtgtgagccatggcaccagccttagttatcttttttgtgttgagaagacttaaaatctactctttaagcatttgtcaagaatacaccgtaactacagtcaccaggttgtacaatagatctcttgaacttattcctcctagctacctgaaattttatatcctttgaccaacattgccccactcccaccacctggcaacctcagcctctggtaaccaacatttcactctatttctatgagacaacttttttaggttccatatatgagtgggattatgtagtatttgtcctctgtgcctgacttatttcacttaatataatgtcctccggttcaaccttgttgtcccaattgacaggattttcttctcttttatgaccaaatagtattcagttgtgtatctctaccacattgtacaaatccgtttatctgttgatgagcacttcagtcgcttgactattgtgaacattgctgcaatgaatatggcagtgcagatatctttttgacataccaatttcaattccttgtgatgtatactcagtagtgggattcctgggtcatatggtaattttatttttatttttattgatttatttctttgggacagggtcttgctctaaagcccactctggagtgcagtggcatgatcatagctcattgccattttgacttcccaggctcaagtgatcctcccgcctcagccccctgagtaggtgggaccacaggaatgtgccaccacacccagcttatttatttatttatttttgagacagggtctggctttgttaccaagctggagtgcagtggtgcagtcttggctcaccgcaatctccatctcccagattcaagcaattctactgcctcagcctcccaagtagctgggactacagatgtgcgccactatacctggctattttttgtatttttagtagagacaggtttcaccatgttgaccaggctggtctctaactcctgacctcaagtgatctgcctgcctcagcctcccaaagtgctggcattacaggagtgagccactgcacccagccactaatttatttttatctggaaaagaaaagaggttcatttggctcaaggttctacaggctgtacaggaaacatgacatcagcatcagcctctgatgaggcctcaggaagcttccactcatgatggcaggtgaaggggacctggtgtgtggagatcacatggcaggaagcaagggagaactattattactgtggggtcagcaccaacacattcatgagggatccgctcccgtgagcaaaacacctcccactaggccccacctccgacactggggatcagtttgcaacctgagatttggaggggacaaatatccaaattatatcaggtggacagtgtggctgaggctttccctgcttcagacggaattggacacaggctctgggagagaagatacaaagtgccgagaccagctcagtcagggagaccctaacccagcggcactagaggaattaaagacacacacacagaaatatagaggtgtggagtgggaaatcagggttctcactgccttcagagctgagagcctcgaacagaggtttacccacgtatttattaacagcaagccagtgataagcattgtttctatagattatagattaactaaaagtattccttatgggaaacaaagggatggccaaaacaaagggatgggtatggctagttatctgcagcaggagcatgtccttaaggcacaaatcgctcatgctattgtttgtggtttaagaatgcctttaagcggttttccgccccaggcgggccaggtgttccttgctctcattccggcaaacccacaacctttcaacatgggcgtcatggccatcatgaacatgtcacagtgctgtagagattttgtttatggccagtttgggggccagtttatggccagattttgggggtcctgttcccaacacaaaggggtgaggaatgaggtcgagtgttccaacacagttttagcaaatgcaggtacagacacccagggtgggtgtaactgaaacgcatgcttcatggagatgcactcagctgagatgcctgatgtgtgtggggagggtgggtgcaggttagcctgagcatggtggcagcgtgggattcggacacagaaatgatttgcaggagtcagaggagggtcggtgtgctagtaacctactgctgcacaacaaattatccaaaaacgcagaggcttaaaacaacatccttttattatctcttcgtttctgtgggtctggaacccaggcacggctctgctgggttccctgtttcatggtctctcccaagaatgccatcaaggtgccagccaggacaaatatctcatctcatggctcaactggaaaggggtcacttccaagttcattcacttcatacaacctgtcggactgagggcctcagttcttccccggcttttggcctgaagctgctttcaattccttccctcttgggccttgcagaacggagagcttgcttcattaaagcaagcaaaccaagaaggcagttgagtttgccataagacagaagtcacaatcttttgtaatctcatcatggaagccacctcccaccacctttgccatattctttgggttagaagcaaagtcataaagtcgggcccacactcaagggaagaaaatgacacaagggcacccaaacaggaggtggaggttgttggaggccctcttagaagtctgcctaacaccagtggggaggtcccgagagaaaaatatctcaaactaccctccccccgggtctggactctccttgagaactatttaaagagagaatcttttaagggaattaagtggcaaagaaaaaaagttataaaaatgctaatactccaaaaactttctggggagttcctaatggtttataagcactgtgcttagtttcttacgagactgccttttaaaaatagtaattaatgggctgggcgcggtggctcgcatctgtaatcccagcactttgggaggccaaggcgggcgtatcacctgaggtcaggagttgcagaccagcctggccaatatagtgaaaccccatctctactaaaaatccaaaatattagctgggcgtggtggtgggcacttgtactcccagctactcaggaggctgaggcagcagaatcacttgaactcaggaggcagagattgcagcaagccacgatcgtgccactgcactccagcctgggcaacagagtgagactccatctcaacaaaacaaaacaaaaaatagtaattaatggaaaacaggtaattcacctgtaatttatcaaaaccaaagcttcctcaccccaacccctacacagggtcaaattcagtgttttgtcctcgggaaaaacctgacagtgttctagttgtcttttgctgcaccacaatcatcccaaagtttcacagcttagagcgatgtgggggttttttggtttggggttttttgtttgtgtgttttttaagacagagtctcagtctatcacccaggctggagtgcagtggtgcaatcactgctcactgaagctttgacctcccgggttcaagcgattctcccgcctcagcctccctagtagctaagaccacaggctcataccaacacacctggttaattttttaattttttgtagagacagggtttttccatgttgtccaggctcgtctcaaactcctggtcccaagcattcatcccatcccagcctcccaaagtgctgggattgcaggcacgagccactgctccagaatcaaagcaatgtttattctgctcacgaatctacaacttggataggactcactggggctcatgtctgcttcactcagcatcagctgggccacttgaagacaggggactggaaccttctgaaagctctctcacttacaagtctggcaattgatgctggctctcagatggggctgtgaccaggatacctacaggtggcttttctgtgcatctgcttgggcttcctcacagcatggagactgggttccgaggatgagcaccctgagaaagagagagccaggcagaagttatccccttttatgacttagccttcaaagtcacctggggtcactcctgccacagtctcaggcctgctagattgaagggatgggaacataaatcccatatctccatgaaggagatcaagtcatcgaggtcattgtaaggagggcatgtggcataggatatatccgtgcattcacctttggaaaatacaatcagccacagagagcaaacaaccccaccaccatcccacccctgagctttcacgggtgtcagtgacaacaagcatcgtaggatgaaaagaagtcagcaatcatgaaaaaataaagcagcaagaagtacaatcctttccacctcgtctcccatgagagcaggaggttgggaatgaatccatctccctgaactagagaagagacgtgcaaggtcactgggccgagcctgtgggtttgggtttctcagctggcctgttacgatgaagcttgttcttgtctattgctgcacaccaaattaccataaatttagcagctttaaacaacacccgtttattatctcacagttttgtaggtcaggagtccaagcaggcttggctgggttctgctccggtcattacaaggctgaaatccaggtgtccgccagaaattctgttagccagggcttctatcatcagttcttctctgcagggcgctgctagggaggtcctgaccaccagagggcactagaaccacaatcccggtcccagggaactttgcttgtgctcccgcccctttctgtcaaaatgctgtccggccaccagcggcagcagcgtctgggaacttgtttgaaaagcagaacctcaggacttaaaaccagacctgctgaatcaaaatctgcattttgtcaactcccccacccaggcaattggtgtgcacccttgagggccaggctgtaactcagtggttctctaccttggctgcgtgttagaaccaccagaggaagtgtgtgtgtgtgtgtgtgtgtgtgtgtgtgtgtgtgtgtgtgtgtgtttgagatggagtctccctctgtcgcccaggctgtagtgcaatggcgcgatctctgttcactgcaacctccgcctcccgggttcaagcgattctccctcctcagcctccagagtagctgggattacaggctcccaccattacgcccggctaatttttgtattttagtagagacggggttacaccatgttgaccaggctggtctcgaactccttaccccaagtgatctgcccagctcggcctcccaaagtgctgggattacaggtgtgagctaccgcgcctggcccagaggaacttttaaaatccctgatgcaagggactacccccagagattttgattgcattggtctggggtgcagcctgctgcccggattgttaaaagtttccctggggattttactgtgcagttaaggttgagaagggctgcaagcctgggtcattgcacactgtaagaaccttgtgtatgaatggaactgtgctatggaacaactccacaccacctgtgtgtgtaggcataggagaaacacataaaccctgaccctcaagggtctcctggaatgcaagacctcagccctcaggggccttcagataaaggtgcggtcagggcaaacatggaacaccaaggacgtgtgatattattttccaggtgcttcaaagactcaagtcaaacaccaactgctcagatagcaaattctagttcacccaccccacccatgctcagtgatggggctcacggcagtttcctgtaagtgtttgctgggctcgcctttctaactccactgtgggccccctgagagaagtaatgagtcgggtccccactcaatggagccctgttcgcagttgcttttgtgacgtaggaagaaaccagctggtggtggaattggtgagttgtgctccaggaaagaaggtgcctggaagacagagatcagcgatgttaggaggcactctaaaaaaatatattctttcctatttatatagagcttcatggttcccaaagcactcttaggtgcactgttgcatttttgtaacacccatctgcattagattagagtttatctgtacagatgaggaaaactgagtgacagaggcgtaaatagatatgcgggaatttgcatgagtcaggcagaattagaacaagaaatcgccttcctaaatttcctaatttcctatatgctgtttccaggatgtagcaatacccagcttctgacttctctttcctcaccgttgagaccatttctgggggattttgtcttcattctttctttttgttctcctccccaaaattgtgggtttgtttagtcattctggaattctctgttaatctcccaccaaatgtccattgacgtacttgatttctcatttttgaaggaagattcaccaggtgtaaattcttaatatatgctagcaaagacaatgatttcatcacattataaacttctcgaatgcaagaaacttatttcccattttatctctagcacctttgacaaatatttgtggaatgaatgaataatgaatgaaggggatttgcaaagttaaatgtgagtgagggaggaagcagacccaggaaattaatctggagccagtctgcaggtggtgtggtgggcgtggttgtaacctctggaccaagagctgtgaacgatggtgcacaaagaaatactgtcagcaccacagagagtgggttttatcttctcaaataatggccaactttcctgcatcttcttcccttttcctgctcctcttgaggatgtattccctgctcaaatgaaatgctgaaacgtggctgggcgcagtgactcacacctgtaatcccagcacttggggaggccgaggcggatggatcacctgaggtcaggagtttgagaccagcctggccaacacggggaaaccctatctctactaaaaatacaaacattagccaggcatggtggtgcaggcctgtaatcttagctactcgggaggctgagggaggagaattgcttgaacccaggaggtggaggttgcagtgagccaagattgtgccactgcactccagccggggtgacagagtgagactccgtcgcaaaaaaaaaaaaaaaaaaagggctgaaacgttctttgaagaattcagcgagcctttggatactgactttcagtaaaggcctccccggctccgtgcctttttttctataaagtgtccttactcttctggggtcagaaacccttccccttctggggtccccaaacaatgctcctccctgagacaaatgaggtgtgggaaggatgtgagtgacatgcccttcttccaccaccagtgtttctgctgaaaccatattcactttattaaattaatcagggaagaagggacggggagaaatgaaaataaccaagcttgcagcacattcagcggtcatcatgaggtcatcctgctctctgacctgccctttctcacagtggtttggtgcctgttgttctagaatcacacagacctgttccaagatgatagttccccttaactgctc[136 bp omitted]tggtgaaaccccgtctctactgaaaatacaaaaattagccaggcatggtggcaggtgcctgtaatcccagctactcaggaggctgaggcaggagaatcgcttgaacccaggaggcagaggttgcagtgagccaagatggtgccactgcactccagcctagatgccaagagcaaaactgcctcaaacaaacaaacaaacaaacaaaagaaatgttaagttttccatttgagatattttttcaggttctgtatactgatgaaaccactgatgccatttggtctgaaggaacccacaggagctgctgactcactaaagaatgcagttttcacaccctgatttcatccccctaaccccaagcaatcaaccaccccaattctccagctcctcgtccttccatgatccccttaaaatcgccagcccagaactccttggggagatggatttgagggtttcctctcatgtcctcacttggcgccctgtgatcatgaaactctttctctgctgccaaccctgctgtctcagtggaatggtctgtcactgcacagtggatgtgtgagcctgttggtcctataacactgcttcatcagaatgctctgaggctccataccccaggcccaccctgcactggccagctccccctgcccttctccccattgctgtactcccaccctcctccactttcttccctgagagctggctcccagggtctgcagggctcatccaggttggttctgtggccaaggggcatggttccagctcagccccttctgccccttggacttgagaaccagggtctgcagtccacagtggagtaggccttgtgtatgggctctgggtccatacttaggaccttatgaggggcaggtgatggtagaggaagaggctacccctagtgggcatttgattggcaatgggaaggcttagaaaggggtcacaggctggagagcttcatggactgcatcccaccatgaaggaaatggaaacttggcttttccattctcaggttacaagggaagaaactttcatgatggtgttgataaagaatattctgactgaataagttggggccaatttggggttgggtctcagggaaatgaagaggctgtaagagcccaaatctttcccttcacgtggcccccagagtctttaaactctcctacttcttcaaggcccaagccccttccttcaactcatcttggatcacacgtgaacaaagtaacaaacatttattaagaatttgtattcacagcctggcacagtggctcacgcctgtaatcccagcacttcggggaggccgaggctggtggatcacctgaggtcaggagttcgagatcagcctggccaacatggcgaaaccccgtctgtactaaaaatccaaaaaattagccgggcatcgtggcgggcacctgtaatcccagcaacttggaaggctgaggcagagaatcgcttgaacccggggggcagatgttgcagtgagccgagatcatgccattgcactccgacctgggcaacaagagcaaaactctgtctcaaaaaaaaaaaaaaaaaaaaaaaaggatttgtattcacaaaacttcgtgccaggctggatgcagtggctcatacctgtaatgccagcattttgggaggccaaggcgggaggatcgcttgagcccaggaggtggaggctgcagtgagttatgatcaaaccactgcactccactctgggtgacagagcaagatcttatctcaaaaaaacaaaaaatcacccaattctgtgccacagggaaacttttggggactatgaatgcacacatttgctagaagccattgaagtatacactcaaaatgagtacattgtgtgtgtaaattatacctcaataagttgatttaaaaaaactgcatcagaagattggcaagaatattggtaattgtcaaagctggatgatggacacgtggcagctcattatgcttttctctctacttttgagaatgtttaaatttttcataataaaaaaataaatttattctgtgctaatacatttagttctgggaagcaaagtgtcattgggtatgtaagagtcacactttaattcttccatgtcacaagcaattcactgagcaccagccttgtgccaaacattgggctggtacactggaaatcttatgacaaggtcacagcctgcccttgtcccgatggtttgcacagtggagggaaagagaagggcgcttaacaaataattgcccaggtaaatggtgactttcataatccatataaagaagccagatgccatcagatatgatggaagaacccaccttgctctaggcaatcagaaaggctttctagaggaggtggtggttagactgggtgctgaaggatgaataggagagtgagagaaaaatacaggagcatttgttgttattgttgttgttgttttgagacagggtctcattctgcttcccagactggagtgcagtggcactcactatatagtggcactcatagctcaccataaactcgacctattgagctcaagcgatcatcccgcctcagcttccccattagctgagaccacaggtgccctccactatgtccggctaattttttttcttttcttttttgctagtgacggggt[145 bp omitted]tcaatgctatgtgattaattccaagtacttttccctggggaactcttattctaccaggagattccaaatggtggtaaacactttattatgattcaaagcgttaattactataatggaaaaaacctatctcattgggaaccaaggagagaaagaattcttggagagaattattgctgaagtatttacaatggaagttgctgctaaactgggtgttaaaacacagttgatgttcgctaggtgcaccaaaggtctgcatgaagcagaagtgctccagctgttcaaaacctcaaatgagcactttgttccaggaagaaagacaagggcctgaaactggactttggaaagcgggtggatttgtagaggaaggaagagcattgcaggaaggtggatcgcacaggttttaaggggtaccttctggtggtgtgtgagagacagagtgagtggagctgagggagcaccctgaagagcagggggatatttggctgggtgtttagctagggtagggtcaacacggaacccttcgatgccaagatgaggaggttggaaaggaccctgacaatgggacctcactcccagttgcattcccctatcactgcctcaactttaggtgtgtggaagagcagaccctggtggcctttcagtaccaagagtcatctttggtcaaaattgctgaggatcaggtctgactaggagcacctagtctggctggaggcagaggtggccaggagccgagcaccaggggagagagagctctcagcatgatgaggagagcaccatccagtttacatatttctttctggaggaatcttcaagttctcccaacttgattcaggacaggtgacccccaaactggggcttagcatgtgagggttcttggctttgctcaagaaagaattcaagggtgagcagtatgggccagtggtagggtagaagaaaagaggctcattgaagaagccgtgttacagctccatgactgctcctgcagagcaggactacccggtcccgtaggcagacagcagcagctcagagcagttctgcagtcagatttatgctcacatttaattgcacgtagattaaggggcagtttatgcagacatttctagggaaggggtagtagctttggggtcattatatcattgccatggaaaggggtggtgactctccggtgttgccatggcaatggtaaactgacatggcgcactggtgggtgtgtcttatggaaaactgcttccctcccgtccctgttttagctagttctcagtttggtcaggtgtctgagcctcacctctggagttgagcccacctcctacctcacgggtgtactgcagccagtgagtgtcattgagtccctgcatataacaaacagactccgagatctgccttcacccagtggcagttcatgaccttttggacatggtgcatagatagtgatagaatagaaaggcagtaacgtcatccactatgcattgtcttcgttctaatcacaaaataagtgtttgaaaaattaagcattatattttcaggtgcctttcaaattctagacccagcgtacatacatacatacatacatacatatatatattatgcataacacatctatgtgccgtatttactttttttttttttgagatgaagtctcactctgttgcccaggctggagtgcagtggcgccatctcggctcattgcaagctccgcctcccaggttcaagtgattctcctgcctcagccacccgagtagctaggcatgtgccaccctgcccagctaatttttgtatttttagtagagatggggtttccccatgttggccaggctggtcttgatctcctgaccagcctcccaaagtgctaggattacagcatgagccactgcgcccagcctttatttactttataactgtacttaccttatgtaatgagtatatatgaagtagtgctaaaatatacatatttaacatttaaatatcatgcagcattaaaagacatggctgggtccagtggctcccatctgtaattccagcactttgggagaccggcaggcagacggaatgaacccagggttttgagaccagcctgggcaagatggtgagactccatgcctacaaacaatacaaaaattagccaggcatggtggcatgtgcctgtagtcccagctactcaagaggctggggtgggaggatggcttgggcatggaagaccaaggctgcagtgagctgggatggcatcattgcactccagcctgggtgacagagcaagaccctgtcacaaaaaataaataaataaacaaacaaacaataaaagacatataaataaataactgtcctctaccttgcatccacatcccataatcaatcattttcgtcttttggctcttctattattgctttatgttgctgaataatttgcatattctaatatctcttttgcattttaatcagtattattgaaggatagtttatatacaataaaatgtgtctcttttttgttacttatcgttttgaaacacctgtattccacatgtgtttattaggtgtttacgatgctctaaaagtgcattacaaataagtcatcaaaccactagcttagcaaattcacacaggcatgtcagcagtggggaaaataaaacaattaattataatgtcccattaataatatcctgtaaatatcaaacacaacgcattttttttctttgtcctcattgcaaactatactgcctaggccatccgtaaacaaaaatttttgtgtgtattataagtatttccatcagtttgggattcttaaactcaaaattcttggctctaccagttgcaaacttttaaaattttaattctaatcagtcatataaatgcacaatagcaaaagtcaaagaattcaacaagatttctaaacccagcagctctcttctctactccatgccgtcccaccccatccccctctccagaattagccactctctcttttagtgcatagttctattttcatctccttttttttttttttttgagttggaatttcactctgttgcccaggctgtagtgcagcagtgccatctccgctcactgcaacctctgccgcccgggttcaagcaattctccagcctcagcctctcaagtaactgggattacaggcatgcaccgccacaccaggctaatttttgtatttttagtagagacagggtttcaccgtgttggccaggctggtctcgaactcctgacctcaagtgatccgcccatctcagcctcccaaagtgctggaattgcaggcatgagccactgtgcccggctccacgtttataaatagcaggtttatatacagtcttgaatttgaatgttatatattatcaacttactttttactagaagatgatgaattcgctcttttcactcctctcccacacacatatttccttccccccccttcaatcctcccagaattgtcatgtcatgatttttattaagttcactgattatgttatggagatcaggaaaatgttagagatgagctatgtcgtgcgctgtccttacatttctttctcatgcaaactttttgcttttctttacaactgtagttgagatttgtccttttctctgctttgaataatttaaactccaatctctgtccttctgctccaatctatactttcttcaagccagctgcatgattctcctgctgggacttcacttcaccatctagtcatgttggtcctccattttctctttcctggtttactcccttgtttagggtgaaaatatcttccaggagcttcctgagaaagactgtttgggaggaaactttttgagactttgtttgtctgaaaatgtctaaccctgtttccacttgagtgataatttgatagaagtccaggttaaacagcagtttttccccagagtgtccaatgtcctcccacctgtgatcctttgactgtgatctgtttggctttttttttttctctctctggaaacctctagaactgatgttctgaaatattattaccatattttaacaattgtggagcactctgcaggctcttcaaatttctttcagttatggggacatttctttaatactttcttcactactggagtttctgttttctcttttttggaatttctgaatttatcctctaattttcttatattgtctcttattatccacttttgtcttttattctgctttccagaagttttccttttagtttgtcattgttttttagagacaaattctcagcggctgggcacggtggctcatgcctgtaatcccagcactttgggaggccgaggcgggcggatcacaaggtcaggagatcgagaccatcctggctaacgcggtgaaaccccttctctactaaaaatacaaaaaattagccaggcgtggtggtgggcacctgtggtcccagctactcggaaggctgaggcaggagaatggcgtgaacccgggaggcggagcttgcagtgagccgagattgagccactgcactccagcctgggcgtcacagagagactccatctcaaaaaaaaaaaaaaaaaaagagacaaattctcgctctgtcactcaggctggagtgcagtggcactatcatagcccactgcagcctcaaactccggggctcaagcaatcctcctgcctcagcctcccaagtagctaggactgcaggcttgtaccacttgtaccaccatgccctgttaattttttaatagagatagggtttcactatgttgcccaggctgatctcaaactcctggtcttaagagatcctcccactttggtccccagtgtggtggtgttgggtgacgggacttttaagaggtgatttggtcattaagagagactgatgccattctctcgagactgggttaattctggaggcagtgagttctcactcttttgggactggattggttattgcaagggcaggctgttataaagtgaggttccccttaagttttgcccctttgacacacacctgcttctcttctgcttttccatcatgttatgatgcagcactagcccctcccccgaagccaaccagatgccacccactcggtattggacttttcagcctccagaaccatgagctaaataaatttctgttcactataaattacccagtctgtaatttatagtggtatattctgttataccaacaaaaaatggactaaaacaatcactgtccgtttagatttacccacacatttatcattttcattgcttgttattccatcttacagctcatattttccctctgatattgcttttctttcttctgacctaattttttaagaatttcctttagggggatatgttcatacaaaatatttcagtttttctctgaaagtgtattcagttcatcttcatccttgaatgattcttgggcctgcagttctagatggacatgtgttttctcccagcacatcaaagctattgttccattgtcttctcgttcccatttttgctattgagaaatcagtagaaagtctaattttgttttcatatatgtaatccatcctttatttccagccacttttaagattatgtcattttctttggtattctgtggtttctaggtatgctttttaaattattctttaaaaactgaatcgaggctgggcgtggtggctcactcctgtaatcctaatactttgggagaccaaggtaggtggatcacctgaggtcaggagtttgagaccagtctggccaacatggtgaaaccctgtctctattaaaaatacaaaaattagccaggtgtggtggcacatgcctgtagtcccagctactcaggaggctgagacaggagaatcgcctgaacccaggaggcggaggctgcagtgagccgagatcatgccactgcatggcattttcttcatctgatttttttttttttttgagacagagtcttgctctgtcaccctggctggagtacagtggcatgaccttggctgactgcaacctccacctccggggttcaagcccttcttgttcttcagccttctgagtagctgggattacaggcatgcaccaccacatctggctaatttttgtatttttagtagagacggtttcacatgttggccaggctagtctcgaactcctgacctcaagtgatccacccgccctggcctcccaaagtgctgggattataggtgtgagccactgtgcctggcctctgaattttttttaatgttgcttttatcctttttcttttgataactttgttcagtttctttgaataccctttcttctctatctttttaatgaaactttccaaacacagaaaagtcgaaagaactatgcagcaaatagctgtatacataccacctatgcccttaacatttcactgtacttgctctatatgacttttttatgtgtctaaagtgagttgcagacatcaggttcccacccctaaatctgccggttatgcatttctcttttagctacctttgacttggggggaactcttcctgtgccaagtaattgaagacatttgtgcacagtagggggaagcttttgtttctgcctagcaggaagcatttccagtttccaggaacgttgctaatttagaggaatatgtgtatgtgtgagttgcttaaacttcctttgccccagatggccaagaacagcatccggaaagccacttacagtgcagcagctcagccccacctcctcctggcaagcaggcagcatcctgtccagacaactgtgtgttgatccctcctccagcactgctttcctggccccagacatcaatggcagcaagtgccaggaaggttccaacggccaggctgtatctctcactctttgtgttccaaacaggtgactgctggtttgcccatcacaacgagcctcttgtgccttgtaggcttagtctaagatcagaaccatgggcactccttcttggcttcctcctcgactcacttgacttttcctgtgttggtagctcttcctcctctgacctttcagataccccctagttatgccagaagtgcagagtgcatttatgtttctgaatcctccttgctggtctggtgtaattcctgaaagaaggcatactgcagtaattttacttatgattctttttgcaactagcaagatcaaccagatatttatttattttcattttttagaaaattttaatataattttaatgttgtagggagcatggggaatatggagaagggcaggaagagacttttgtgggtgatgttggttagcttgattgtggtggtgatttcatggatatatacaaatgtcaatatcaaagataaaaattgtataatttaaatatgtgcagtgtatcatatatcaattatacttcaataagcctgttaaaatagttttaacaatgatgatatattgcaacttttatgtattttaaactaattgagtttttatacatgaaattgtacatgtaattgagtttaaaatacgtaaaattttaatgacaagttaaattttataacatacattcagtaaagtgcataaatcttaaatgcatagtataattaatttttcatatgactaccactaccactcagatgaaaatatagaatactggctggaagcaaatggctcatacctgtaatcccagcattttgggagaccaaagcaggaggatcccgtgtggccaggtatttgagaccagcctaggcaacatagcgagaccccatctccacaaaaaataaaaagtaaaaatattagccatatgtggtggcacatacctgcagtcccagctactcgggaggctgaaatgagaagatcagttgagtctgggaggttggggttacagtgagttatgattgtgtcacttcattccagcctgggctacagagcaagaccctgtctctaaaagaataaaaaaaaatatagaatacttccaacacttcagaagatccctcgcgccctcctagtcattatcccctgagggtaagcactattctgacctccatcaccatggattggtttcgcctgttcttgaactttatattaatggagatgcattcacgctgatacttgcggcaatagtttgctcattttcgttgccatatagtattccactgtatgaatatatcacaatttatttattcattctctttttgatggacattagggttgtttcaaggttttggctgttatggataaagctggtatgatcattcttattcaggacctttaatggacatttgtggtctttttacttgagtgttgtagtaagtagtataatagccccccaaaagatatgtccacatcccaaccctcggaacctgtgacagtgactttatttggaaaaggagtctttgtacatgtaattttttttttttttgagatggagtctcactctgttgcccaggctggagtgtggtggtgcaatctcggctcactgcaacctctgcctcctgagttcaagcaattctcctgccttagcctcccaagtagctgggattacaggcatgcaccaccacacccagctaatttttttttttttttttttttgtagagatgggatttcaccatgttggccagccttcaccatgttggtcaggctagtctccaattcctgacctcaggtgatctgcccacctcggcttcccaaagtgctgggattgtgggtgtgagccaccgcacacagcttgtacatgtaattaaattaaggatctcaagataagatcagcttgtattatctgagtgggctgtaaatccaatgacaagggtccttgtaagagacacagggagtaggagaaggccatgtggagacagaggcaaagatgagggttatgcagccccaagctaaggactgtttagagccaacagaagctggaagaggcagggaaggattagagccttcagagggaacatggcgcggctgacaccttgactttggccttctggtctctagaacactgagataataattctgttgtttcaagccacaaagtttgggatcatttgtgacggcagccaaaggaaattaataatacaaaagttcactttattaatactcatttatatttgtttgtgatgtgcacaacactccaatggaaattttaaaaagtgtttggagtacagactttcccaagcctggctaactttttcttccttctctgggaatggatgttttgcgcagtgtacagaagtgtggagagtgaccccaatgtccttgttgatgtgtgtctgtaaatcttacctgtcacagtgtgggcactctgagagccctgtgtccccaccagaagcatctgttccttatgcagcctgagtgtcctctgctagggtggccagttcccctcctcctgccctgcctttttgcaggttcacaggtgcaagactggctgtttcctgttaatattaactatacttgaattttcaaggatttttttaagaaaaaaatatataatgccaatacaaaaaaaaacacaggaaaaaaaattaaccttactaaactaaacctgccctgataggagggttcttctcacaaacctgactgcagagcaaaatggaattgctccaatttctccctttgcaaacaggcatgcatcaacttctcattttaacaactttctttctttctctttcttctttctttctttctctctctctctttctttttttcttttttttttttcagacagtcttgctctgtcacccaggctggaagtgtagtggtgcgatcttggctcactgcagcctccatctcctgggttcaagggattctcctgcctcagcctcctgagtagctgggactacaggtgcacgccatcacacccagctaattttttgtatttttagtagagagggggtttcaccatgtgggccaggctggtcttgaactcctggcctcaagtgatccacccgccttagcctcccaaagtgctgggattacaggcatgagccactgtgcccagcctttaacgactttcttaataagtggtgtgggaaaacacccagagctaaacaaaaccaacatggggaagtgacaagcatttgagaattcttacatttctcatagctgtattcccccagaatctggtatccagctttttttttttttagtctggagacaggttggagtgcagtggtgtgatcagggcttactgcagccttgccctcatgggctcaagcaatctgcctgcctcagcctcccaagtagatgggtccacaggcatgtgccatcagcctggttaaattttctattttttttggtgaagatgaggtcttgttatgttgtccaggctggtctcaaactcctgggctcaagcaatcctcctgcctctgcctcccaaagtgcagagacgataggcaggagccattccagcatctcatatgatgtggttgttgaaatcgactctctcgggaacatttaacaatagctaaaacagttgagtgggcactgggtgtgtgcttcagctcaggctcttacttatattgttagattccctcaaaatccctggaggtggggaatttccttgaggtgggggttttccacgctttccagatgagggctgtacgctcattgactagaggcaccgtgtctaagtgtctgaggcttaattcccattctctagaagagcagctgactatgtgtatgtcagtgggaaaggggagagcccagaaaatcattgcagtttatcacagccacccccaccccctccatcactgcagaaactgagcctccactatcttggagtttccttgaagagttcccagtcttggtgaaatatgggatggacggccaggcacagtggctcacgcctgtgatcccagcactttgggaggccaaggtgggtggatcactttaggtcaggagtccgagaccagcctgaccaacatggtgaaaccccatctctactaaaaatacaaaaattagccaggcgtggtggcgcatgcctgtaatcccagctactcgggagactgacgtaggagaatctcttgaacccaggaggtggagcttgcagtgagctgagattgcgccactgcattccatcctgggcaacagagcgagactctgtctcaaaaataataataataataataataataataagaaatatgggatggaatttccattggatgttaaagatccttccaaaataggtattttccacagaaaatgttatatttggtctgacaactccttgcaaaaatgaactcaaatggtcaggaatatttgttgctctaggttttcagaagcagaatgggcatcctttcttagaatacattctgggcccctcagggtgttcagggtgggaataaagtatataaaatgagaagtcaaaacagggaagaggtactaggggggaagctgggcagaggaaaggaacccttgggaggcccaaactttaatgctctggttcataaaatgcaaaaaaaaaaaaaaatccattctcatccctcctgtcctgttattgtcaagatgctagctccttggacaattcaggatacaccaagctttctccccggatagccgcaagtttaagggcaggaaatggccttggactgggtgcctttgctgagagaacagcagcactttgatccaagatgtccaaaagacaaagcagaagttcatgagaaacagaggccccagcatcacttggggtggcggggagggacctgtgcagcttgcgccatggacacctcgttagtgcataggagtgcatcagttttacagaaacggggctccatctagcccaaagggagaacgcccaggctgtgatcaaaggattgagggtaggacatcaaaggttagggactttcccgagtggaaaatatgggaagggattgggtcaaaaccttacagagaatgtgggcgagatttggtaagacgtcaaaacttaaccagacccaagtgggcatatttaggggaaaaccagaagtcatagttcattggaaacagacagatacggtcaacaaatcttcatgtatctggggagtgcaaatatcacgttattccttattgtgtgtcagaaatacgcaagcccacactgtgttgagtacctgcgtgggagtgggagatgttcaggcctgcacacgacctatctgtgcctcagctcttcttgtggaaaagtgctatagaaacagcacaagatctggaccatccaactcaccaacccaccccagctggaattcagtaggcagtcccctgaccctgttattcctctgaatatgagaaaggcagagataacagaataggagggcgatggtttcaatccacagggctctttggatgagaaaacatgggggtgttgttaggtagccctggtctgcttgatatttcatttctggccaggcgcagtggcacatgcctgtaatcctggcactttgggaggctgaggcaggtggatcacttgaggtcaggagttcgagagtagcctggccaacatggtgaaaccccacctctgccaaaaatacaaaaattagctatgtatggtggtgcacgcctgtaatcccagctacttgggaggctgagacaggaaaatcacttgaacccgcgaggcagaggctgcagtgagctgagattgcgccactgtgacaggcgtgggccatagcacagagcctggtaaccaccattctattctctgtttctatgtatttgagtttttttcaggttccacatataaatgagatcatgcagtatttgtccttctgtgtctggcttagttcacttagcataacatcctccagattcatccaaatggcagggtctcctcctttttgaaggctgtatagtattctgttgtattgtataccaagtacctttatctattcatcactgatggacacttaaggtgtttctatgtcttggctacggtgaataatgccacaatgaacctagtccaaaatgggaagtcctcaaatatccatcaatgttaaatcattaagtaaatagtggtatttattcacaatttatttcataggtggaatgctacacaatggtaaaaatgaacaaagtttagccatacacaataaggcggatgattcacaaccacaatggtaaatcagaacagctgggccgggcacagtggctcacaccagtaatctttgggaggctgaggtgggaggattgcttgagcccaggagttcgagaccagcctgggcaacatagcaagaccctgtctttttaaaaaatacaaaaattaggcagatgtagaagcacaccaggtacttgagaggcttaggtcggaggattgcttgagtgcaggagttcgaggctgcagtgagctgtgatggtgccactgcactcaggcctgagcaacagggcaaaaccctgtttcaaaaaacaaaaaaggaagaagaagaaccctaaacaaaagaattctaagtgtatcgttctatttgtatgatgttcagaaactggcaaaacgagagcttttgggaatacgcactcaagtagtaaaactctaaagaaaagcaaaggggctgggcgtagtggctgatgcctgtaatctcagcactttgggaggccaaggcgggtggatcccttgaggcaggagttcgagaccagcctggccaacatggtgaaaccccgcctctactaaaaatacaaaaattagcggggcgtggtggcacgcacctgtaatctcagctactcaggaggctgaggcaggagaatcacttgaacctgggagatggaggttgcagtgagccgagattgtgccactgcactccaacctgggtgacagagctagactctgcccacccactcccgaaaaaaagcaaaggaagggaagagggcagtgcttgtcttcaggaggaagagggtttggtgggaagacacttgtggtgtctaggggtgctgaccgcatgctttttcttgatctcagtagcggttgcaaggtgtatactttataattacatattaagctgtgcattcatattttagtcccttttctgcgtgtatcatctgtcataaaaaggttttaaaaaacatgaagcaacaaagaaaaaattgctgatggacacttatgtgtcttcacacaagatatgaaagaactttacaagaaaaacttaaaaaaagaaatagagatgggatctcaccatcttgcccaggctggtctcgaactcctgggctcaagcagtcctccgacctcagcctcccaaagtcctaggattacaggtgtgaaccacagtgaccggcacccccacc[143 bp omitted]tgaaaccccatctctactaaaaatacaaaaaattagctgggtgtgatggtgggcgcctgtagtcccagctactcaggaggctgaggcaggaggattgcttgagtccaggagttggaggctacaatgagtatgacggcagcctgggatagtgcaaccctgtctctaataaataataaaattaaataaaaaaataaaaatgtaagggaatgataaccatcaaacaaagggcaacggagacttctgaaaggaagacaaaagtggaatggggaggggcccaaggcagtcacagggtactccctggtaatgtgctgattctcaaactgagttggtggatggagttagggggtcgttttattgttctacaccccatatcttataacattttactgttatacattataacccacatctacgggtatatgtcaattctcatataataaaactggcacagtggctcatgcctgcaatcccaccacttttggaggccgaggtgggaggatcacttgaggtcaggagtttgggaccagcctggccaacatggtgaaaccccgtttctactaaaaaaattagccaggcatggtgatgcatgcctgtaatcccagctacttgggaggctgaagccaaagaattgcttgaacctgggcagtagaggttgcagtgaactgagatcgtgacattgcactccagccgggcaacagagcgagagtccatcccagaaaaaaacaaaacaaaacaaaaaaccaaaaaaaaaactggaaaagtaagagaaaagttcccagacctcagccttggggaatactaccagctttcacggaccagggagaggggcaggagttgtgcacgaaacgagatggagctgcatgaggtgggagaagaggaaaccgtgacatcgcagcggccaagggagccttccaggaggaagaagcgtctcccagggtcagggcttctaagagcagttggggaagacgaggactggaatttggatttggccacctgggggtgttttctgaacttggaggagcattcttgtgcccctacgatgcttgcagcagctaaggactccagacctgcagagtctgtcctgagacaggtcagacctcggcggtgggacgggaaaggggaactctctgtctagagacttgcgctccgatgtagttggaggtgctacactgtggctggccacagaccaacacgagcaatggaccacgagaggcctggggtagttagcctttccttcctgtgcagccaagaacggaaggatgagaggggttctttctgcctcctccttggcatgagcacctccacctccatgcccactctgtcctttctcccaggagcagctggccggagagtaacacgactccagccggacatggtcatgactatttcagcctgcaaggtcatgactctctggcccacctaggactcctaggggaaaggaagtgcctggtctaccgcccttcccctgcaagtctgaatgctgtgtggacagaggaggaggacccaataaggtaggggtattggagtactcgggtgcctgggaagatccaagcccggcctatagggtcaaggtcttttccaaaacaggggaaaccctttctggttcccgaaggtcctcccttccctattcgctgaacaggtgggtgccaagaagcccctgtcttgaggacagagagactgcggtctggcctccccagacccaggcagcctctaacatcacagccacagagcagaaactggcctggcttcctcccaggcccagaaggccccagctggccacctccctttgtttgtcttgggaggggcaactgctaagcaaacagggaaggggaatcccgattcggcctctctgtctgtccggctagccgttacccaggcccgggctctggtgcccactgaggcctggctccttcctgaccctttgtgtggaagggacacagggcaggagtgggtacagagaacacccagggctttccgaaaaaaatagcccaggcctcccacagatgagagaggagctatgtggttcggtaaacctcagttccagctacaggcaaatgggattaactgagcacttactgtgttggggccctggcctagccccatgcatgccagagccctccagatactgcctggccaccctgcagggtcctatcagatctcgagtctccaaaagaggaaacaggcttggggtcataagggaatgaggttagcaggggtggtaatcccacccagatctctctgactctcagatcacgggttttttttttttttttttttttttttctgagacagggtctcgctctgttgcccaggctggagtgcaatggcacaatcatagctcactgcagcctcaaattccgggattctcatgtgatcctaccgcctcagcctcccgagtagccagggctatagggacgtgccaccatgcctagctaatttttaactttttgtagagataaggtcttgctatgctgcccagactggtctcaaactcctggcttcaagtgatccttctgcctcagcctcccagagagctgggattacaagcatgagccactgcgcctggtccccaactgtgctcttaatcatagctcatttctcttagtggagccacgggggaaggtggtaagggggcttaagcgggagctctatccctcatctcttttttctctttcccagagaccacaccgctgttccagaccctctccatggatgatgtcctgcccctgatgccttgggagaccctgttggcacagggcagtccccagggctcgcctgacctcccagcagggcagcggaagcagcagccacagggtgacagggcccagggcctggcctctgagtcctggaagctcctggaggtgcccatcattcacataacgccatccagtgatggggagtcccccgcctgcaccccaaccccccgacgccggcagcagcagaggatgccagacccgcagagtctgtcccaggacaggtcagacctgggcagtgggacaggaaagagggtctctctgtctagggagggttctctctgtcaagggtgggttccttgtggctgcgggtcagagcacaaccttagccccacagagggctgactcaaagccacgaaacagatgcacaaacaaaaggtaaaaactgagggtgtgcgttgggacaaccagctatga[137 bp omitted]catggtaaaaccccatcttgactaaaaacacaaaattagccagcgatggtgatggatgcctgtaatccaagctattcaggaggctggggcaggcggtttgcttgaacctggtaggcggaggttgcagtgagccgagattgcgccactgctccagcctgggcgtcagagcaagactctgtctcaaaaaaaaaaaaaaaaaagagtggatgggtggagagggaccccacccagtgtttttcaaactgtaggtcaagacccatttaagggccataaaactaatacagtgaattgcaatcagcccttgttttttgttttttgtctttttctttttgagacagcatctctctgtcacccaggctgaagtgcagtggcatgatcttggctcactgcaacttccattgctcccccctccacccagcagctgggaccacagatgtgcaccaccacacctgtctattttttttgtatttttagtagagacgaggtctgaccatgttgcccaggctggtcttgaactcctgagctcaggtgatgcaccctcctcggcctcccaaagtgctgggattgtgagatgaggcacccggccgcaatcagcacttctttatccaaatcaaaataaaatagaattgcaaataacaccatgcgtgaggcctaatgagggtaagtgtggtttcttacaacttctgtggcattatgtgtatttctaagtgcgtgctggaagcccatgtgaaaggtatttcctgctgtagatcacaggccaaaaaaacaaaaaaaaaaaaaaaagaagaagaagaaaaacaaagaaaaaaagaaagtttaaacaaaacttctgaaaagaaacactatctctggtacaaggagacaggaaatgggaggttcagggccatagggggaagaggaaagaactctaccgaccctgaatagaacaagcagccactgtggtttcttccaacaagggacactccataagcgttaaagtttaggaagcagagctttgtgcatggatgtggagaaatcgcagaaacaatgataatgggggacagcaagttgcaaatgaaacagagggagcctaatcgtgtatctttttaaaaagatactggataataggtgatagtgttggtggatgcctcctgatgtagaaaaaggacagaaaagtacacagggtccaggcgtgctggctcatgcctgtaatcccagcactttgggaggccgaggcgggcagattaacctgagatcaggagttcaagaccatcctgaccaacacagtgaaaccccatctctactaaaaatacaaaaattagccaggcatggtggcgcatgcctgtaatcccagctattcaggaagttggggcaagagaatcgcttgaaccgaggaggtggaggctgcagtgagccaagatcgagccactgcaccactccagcctgagcgacagagcaagaccttgtctcaaaaaaaaaaaaaaaaaaaagcgcaggaaggaaacacaccaactgcatggcaggcagaaggctccttggggggcacgggaagggaaaggagggatggggagccaggcctttggttgtaagtgtaatcatttatttcttttaaaaaaaggacctgaagcaaaatggcaaaatgtccacatctattctatataggtacaggggacatagaggactgttatattttcttcctttttttttttttttttttttttgagatggagtcttgctctgttgtccaggctggagcgcagtggtgcgatcctggctcactgcaacttccacctcccgggttcaagcaattctcctgcctcagcttcctgggtagctgggattacaggtgcaagccactacacctggctaatttttttgtatttttgatagagatggggtttcact[131 bp omitted]cattacactagaagaaacagaccaaagagaaatctaaagagatcagttggacagaggaaggtggtgggaggagggcctctcttccattggccggtgggaggcagcaaatgtcagatggtggatgggggttttagaggtgggggttagcatgagaggtagggcacggcgatagggggggtgctgtccatgcagagggaataaccagtgcaaaggtcttggggtaggaggcaggaaggtgcctggtgagttagaagaacagcgggtaggctggatggggggtgtgagccagggggagatgaggagctgaagtcagagagctgacaggggccttgggtgccaaggtgaggactttgcttttacctggagtgaggtacagctggggcagggctctgagccaggagggtagttaactgactcaggtggtcccaggctctctctggctgcaggtgagaacagacagtaggggcagggatgggagcagggagatcaggcaggagaggatggaggctgggccagggcgtgggcagcggaggaagaagagtttagaatggagcgattgattttatacgtggagcccacagtttgtgacggattggatgtggtgtgaaggaaaagagagggtcagaaaagactctgaagttctgggcctgccattcatcaaaatggagaagtcaggtgggcttcttttgcaggaggaggggaagggttgatggagagggttgggaagggagttttttcaaaagaggcggggacagcgtaccctggagagcgctggggagccacagccccggagctgtgaggtgggactcgcatttctgtgtggttgggccaggagtccaggacaccacctgactctgacctcttgcagacggggcgggggaggggggacgcaggttatggcgtcagagcaggatcgaatccaactctgccgcctacctaccaggtgaccccaacaagtcacttcccatcttagaggccgggcttctccttccgtaaaaggactgattttgcccgttcctgcgctgtccccgggaaaagcccttaccaccgagttagtgggactcccagcactggggtgatgagcgcaaggtctcagcacagataagagccagggaggctggattctgacttggtacttggcctggctgaccaaaactgggaagtccctagaaacggaggcaccggacctcctgggaccaggaacccgggctcagagactgggagagggaaggaggaggcggccaaccggccccaccccttcccgccagcttcaggccccctcccccatacatacacctcggtttcccagcatctccagtcctcccccaccttcgccccggctctcaggttcctccctgggaggtccaggagcttctggccaggggcatagtagttgctagggacccttttctaggtactaggggagggggctccccaacctgcgggcaggcagctgcctccacgatgtttggttttaataaagtctctttgtttccttctctgtctctctgcccctctgctttcccttctctgtccagtccctctctccccggcttctccctccttctaggcctctgcggcccctccccgccttccctcccgggctgggggcggcgccgtgacgcggcggggcgggggaaggaagggggtgtcgctgacgccgcggcggcctccggcggctccggccttttgtgcgggcggttgggtcgggtgggggcggcggccgcggaaggccaggccggtgccctgcggggacgcccagcgcagcccagccccgcgcagcccagccctgccctgccctgccctgccctgcgcccggggcgcgcccaccgcgccgcatccatgttcgagtaaggaccgggcgactagagctcagggaccgggcgcgcgggggaggccaccggagggagggggcgccgcgggcttggggagggggcggagcggccgctgcagaggtcgggggcctctgcacatggctctggccggggcgatcggggtgggggcggggcagggggcccccgggcgaggggtgcagctggggagtggggcgcggacgcagggcagggcccggggtctgggtcgccactgccggcccgcgacgcactgggttgcggggtttggctgggggcccgcgggttcatctggcggggagggccctcaggcctggcaaccccctgcctggtaagccaggggtgagcgcgaggccgaactggggctccggcctgggatggagacaggatcgggaccagcccaggcccacaggccgcggagccctgggcgcgccgggagtaggcagccccctcctgcctgggccccctcccaccgtccttggctgttgcgggtctcggggctgccgggggtgggggcttcctgcgtctctccaggaccgcgtgcttgaggtcatggagggcggggggtcctgtgtgctcggaattgacttcttactccccttccggtccaggtgggcgcatgtgcttccgactgtgaattgtcttgcaagtgtgtgtacgtgtgtctggggctgctagcctgcagcagctttgggcctctgatagagttcctgcgtgtaacttaaccactaattctgaccgcggctctgtgtgtcactgtaagttacctgtgtgtgtctggggctccaaatctgtggctgtgagcagctggttgtgtgcgtgttgtgtctcattccatctgtagctccctgtgcaaatataaattacccctgtgtgtctgagtgtgacgttggagtgtttgtacatgtgtctggagttaccgtgtgtagcagctctgatccttcttgggctgtgtgtgttttaccattaattctatctgtagctccaagcgttgctgtaagttaccagtgtgcgtcccattgtgacttagtggtgtgtgtacaagtgtgcctggggctctgggttctaccatgaccctctgtgcctgcatatgcctgtaatttagctctgaaacgctcttctttttttttttttcttttgaaatagagtctggctctgtcgcccaggctagagtgcagtggcacgatctcggcccactgcaacctcctcctgctgggttcaagcaattctcctgcctcagcctcctgagtagctgggattacaggcgtgtgccaccacgcctggctaagttttgtatttttagtagagatggggtttcaccatgttggccaggctgatctcgaactcctgacctcaggtgatccacccacctcggcctcccaaagtgctgggattacaggcttaagccatcgcgcctggcttgaaactctcatttagctctgtgtgccaatgtaagttacatttgtgacattgttgtgtgtctggggctctgtgagtgtggctgtaacttaatttgattccatctttgtgtgaacattcccttgtgtattcctttgtgacagtattgagtggtgcctaggcctctctgtgtacagctgagaccctctgtggttttgtgtgtgtgtgaacagtgtgagaccccttgtggctctctgtaggcttggaaccctcccttctaagaccctgggagtacccagggcactttggaggcaataatgataactgacgttgtccacctgttacagttagtatagcatgtgccacgcattattccactacctggccactgtgtcctcgagatccacgccctgctcggctgcattattcccaagtcctgcttgactgtgagcatcagggctctccaccagctacagccactgacacctccaccccttgccactttactttttcttttcctttttctctttcttttagacgcagtctcgctctgtcgcccaggctggactgcagtggcacgatctcggctcactgcaacctctgcctcctgggttcaagcgattcttctgcctcagcctccctagtagctgggattacaggtgcgtgccaccacacctggctaatttttgtatttttagtagagatggggtttcaccatgttggccaggctggtctcaaactcctaacctcaggtgatccacccgcctcggcctcccaaagtgctgggattacaggcatcagccactgcgcccagccccttgccactttagaagtagccttttctctgtcttccctgccagatggtgagcccagtgcgggcacgggaacaactcagtggggatgtgttggctgaccgtgggacctgatttacctgggactatgtatgtgtcacctggggtcttttgggactggtctttcactgtatggctgtctttggctctttgctgagacttcctcgtggctatgtgtgtgaatataatttatccgggactttctgtgggttgctgtatgtttctgtgaccctctgcagctctgtgtctgtgtgcacacatgcatgtgtctggataacttttctgggaaattgccatgtgactgtagcagactagcaatgctgcaggtgtgtgtgtgtgtgtgtgtgtgtgtgtgtgtaattactctgtggctctctgtagcatacctatgatgctgttgctctgtgcgtgtgtgtgtgtgtgtgtgtgtgtgtgtgtgtgtgcatatgagagagagagagaggaaagagactccttgcaattgtagggaaatgcagtttacccctgacacctactgtgtgacaatcattgagtttcccttttatgcacacctgtggatgcatccgcccttttctgaccagaggctgctctgggtccactggggcctaggaagttggaggtcaggtgtctgcggaagcaaaacaacatcccttccgagtctcctcgcccctataacagtcccccaggctcctcccttcactctgccttcagctatcctggttgggcagccgcagggtccgcccttgagtacttcctctttgcccagccctggagcaaaaactgggggcgtggtccctgccctgtctgtgtgccttgagcctctcttcaggattccggcccccaggccctgcccctagatctgtggctgcgggaaagtagggcaggtctgtgtttcaggctagagggctgagaaaagcaggcaggggaggatgtggtcctgctgcttaggagtctctccctgctcaccagtgctgtctgggtgaagccaaactcctgactagggtcaccaggcctgtgcacctccgctactccctcagccccactggccacctcactcacactcagacctgccaggctcagtcctgtccctgagcttgatgttctccacctggagtcttctcccagcctttgccacatgtgttctttgtcctcaggtgaacaagtgggctttgttcaggaaggcttttgctgactgttactaaagaaattggttgggcacagtggctcatgcctgtaatcccagcactttgggaggccaaggtgggaggatcacttgaggtcaggagtttgagaccagcctgggcaacatagcaagaccccatcactacaaaaaaactttaaaaatcagctaggcatggtggtgtgagactgtagtcccagctatcagggaagctaaggctggaggatcgcttgagcccaagagttcgggcctggagtgacctgggaggctgaggattgagaattccttgagcccaggagttcggagctgccgttaaccatgattttgccactgtactgcagcctgggtgacagagtgtgaccgtgtctctaaaaaaaatttaaaaagcatctctgcccccctagttgtcccatcccttatctctgtggtcctcaaacttgaatgtgcgtcggaatctctggccccaccccagttctgattcagaaggttgggagtgggtcctggactctgccttttgaacactttccaagtcctgcctgctgctctctggggctcatactgagcagcattgctttatggcgttcaccagtgtctgaggtcgccatccctgctcacttgttttcttactgacggtctatgtttccctgtttcagcgtcaggtccttgcaggcaggggcttgtatgggctttgctcacttccttgtggcgggtgcagggtatttagaggtgaaaggctggagttgagggtcagtcatggaggcgcctaacatcaggcgtagtgcttgtgaggtccctgtcagggtcagcagagcgtcatgggcagtggtgcactgggctggcagccgcgctgtacactccatcttagtccgccagtccctgtgggagggaaagcagcgtagttaaaccaggtgccctccaggtactgggctttgtggatctcacctcacctccatctctgtgcaaccctaggaggtgggcactaattcccatcatacccaagaggaaactgaggcacaggagggttcagacactagctcagggtcacacagaaaggacgcggtggcacttgactggaaggtccttggactgtggggcccacactccaggctgctgccctggagacctgcagggtccaaggagtcgtgcacctgctggaacccaagttctatggggggcggggaaggagggccgatcacccaggccatccccaacagtatgtgctcacggagcacctcctgtacgccaggccctgctctaggtgatggggacactcaacatcgtgggtgggggttgggggtggggagagaaggataagaactagggggaaatactgaaggtcccgggaggcagcagggagacttgctttgcagaaagagagcagggagggggatcgggaggcggggtagggggtgttaaatagggaggtagggaaggtgtccactgagcagagacctgagggaggtgggggagccctgtggatgtggatgtggatgtctgggaggaagggcattttgagcagaggcaccgaccaaggcgggagctgggagagggagtgcagggctgatgagggcagagagggaccacccaggaggaccctgatggactcagatgatcccaggctccctcccactacaggtatgggcagggatgggaacagggagaccagggaggaggctgctgggatggcccaggggaaaagcagtggcctgggccactggctgtttaattattttattcacgtattttattccacaaatttattttacaagtgttacatgagtgcctaccctgcatcctgtcccgcattgtgctggggacagagcagtgacccacagacccgtgaaggacttggacctgtcatcagacagtgacggcccagagtagtccaggatgggagctgcccaggggactgtggggtcacgcatgagccaaagtcctgaaggacaaataaggatttgctaggcaaagaagaactacgatctggacagacagaatggcatatgttaaggcttggaggtaagagagacaactttgagttgccccaggtggtggagggaatcccacctgcaccccagaatacatcaaggcccctaaatgggaatcctgccttgaaataaaccaagcccatggccaggtgcagtggctcacagctgtaatctcctagcactttgggatgctgaggcaggtggattgcctgagctcaggagttcgagaccagcaacgtggtggaaccctgtctctactaaaatacaaaaaattagctgggcatggtggtgggtgcctgtaatcccagctactgcggaggctgaggcaggagaatcacttgaacctgggaggcgcaggttgcactgagctgagatagtgccactgcactccagcctgggtgacagcgcgactctttgtctccaaaaaataaagaaaaaagaaagaaaccaggcccgtatcctatggcaagtggtttgccgctttgagctagtttcctcctctgtaaagcagggatggtgaatcatatcaaaggcaccggcttgagaaataatacggttaatcatacggagagcttgacatatttcctgataaggagtcaacaaagaatgtccttttaaagttcccaacgccatccccacagtccttattacagttcgtgtttgcacagtgaagttgggagtgtcctgtttgttcagtgtctgcctccccaccagaaggctcattccccaagggcaggggccatgtcctgcgggctctactgatgccagctccagccagcgtgcagattattcatttagcctctggtggttattgagcattcactatgtgcctagagttttgggctctagggacccggtggtaaccaagacctgaaggtcacagtctgggtagacagtaaacaaacagtaaacaagcaggacactccagatagcctggggtgtggcgacagaggtgcctgccttaggctggatgatgcggaaggagagcatttgagctgaaggggacagagctggtgatgccggggccatggaaggacattcaggcggagggactacaaatgtggaggccttggcgtgggaatgagattggagagcttagggacaaaagcaggctgggatggccaggggagaggaaggacagggagagggaggacatgaggtcagtgaggttccagggccaaatcaccacaccaaggtgaggtctttgcttttacctggagtgaggtgcacccagggcagggctcagacctgactcagatggtcacaggtctcctctggttgtaggacaccagtgaagaggctgctggggtgtccaggctggaggtgatggaggctggagcagggagaaatgggtataataaaaataacggatgctgggtgcggtggctcacgcctgtaatcccagaattttgggaggccgaggtgggcggataacctgaggtcaggaaggagttcaagaccagcctggccaacatggtgaaaccctgtctctacaaaaaatgcaaaaattagcggggcatgatggcgggtgcctatgatcccagctactggggaggctggggcggaagaatcgcttgaacctgggaggtggaggttgcagtgagtcgagatcatgccattgcactgcagcctgggcgacagagagagaccccatctcaaaaaaataaaaataatagaaatagagctgggtgcagtggctcacacctgtaataccagcactttggtagtgcccaaggtgggaggatcacttgaggtcaggagtttgagaacagcctgggcaacatagctagaccccatctgtacaaaaattttttaaaaataaaaaagctgataacagtggtgtgtacctgcagtcccagctacccgggaggctgaggcaggaggatcacttaagcccgggagctcgaggctgcagtgagccgtgattgtgccactgcactccagcctgagtgacagagcgagaccctatctctaaaaagaaaataaaaataaataatggaaatagattttgaaatgagagatgaagaaaataaagaaattaagaaagatgcttagggttttagctccgacaactgagtggaaagtcgctgttcaataaatatttgttgtatgaatcagtaagttaattttaaaaataggaggtataggccaggcgcggtggctcacacctgtaatcccagcattttgggaggctgaggtgggcagatcacttgaggtcaggagttcaagaccagcctggccaacatagtgaacccccgtctctactaaaaatacaaaaattagccaggcatggtagtgtgatcctgtaatcccagctactcaggaggttgaagcaggagaatctcttgaacccaggaggcgaaggttacagtgagctgagatcacaccactgcactccagcctaggtgacagagtgagagattccgtcttaaaataaaataaaataaaacagcaggtgtctttgagagctcgctatgtgccatgctctgttagaattactttacatgggctgggcacggtggttcatgcctgtaatcccagcattttgggaggctgaggccagaggatcacttgaggccaggattttgagaccagcttgggcaacttaggaagaccccgtctcaaaaaaaattaaagtaggctgggcacggtggctcccacctgtaatcccagcacttgggaggccaaggtgggcagatcatgaggtcaagagtttgagaccagcccagccaacatggttaaaccccatctactaaaaatataaaagctagccatgtgtggtggcaggaacctgtagtcccagctacttgggaggctaaggcaggagaatcagttgaacccaggaggcagagtttgcagtgagccgagatcatgccactgactccagcctgggcaacagagcaagactctgtcacaaaaaataaataaataaaataaagtaagataaaggaagtgctttacatgtcctgatttgtttaagccccaaaacaactggatgaggacatgtatttatcatccctggattactgatgaagtaaccgtagcacagagacgttaaggagcatgttctgagtgtcactgctgggaagagaaacaggatggctgggtggatgggtgtgtattcggggatcaatgggtgggcctctgaaaataggcctgtccccgaatcccagcctgttttttccagttaacacttctcttcctcttcctgcccccagcaccacaccccactctggccggagcacgccaagcagctccccatcgctccggaaacggctgcagctcctgcccccaagccggcccccacctgagccagaaccaggcaccatggtggagaagggatcagatagctcctcagagaagggtggggtgcctgggacccccagcacccagagcctaggcagccggaacttcatccgcaacagcaaggttggtgcaagcccaggtggggtggggagagggctagtgggggctggccggtgatctaggggctcatcctgactcctctccttttctttgcagaagatgcagagctggtacagtgtaagtgtctgggcaaggggcttgctggagggctgggaggaccgggtgctgggccaggagccccaggctgcaacagtcaaggagtgcgtgctgagatggagtgggtgcagacctagggtcacgttctatgctattatttatgtgctgtgtgaccttgggtgagttacttaacctctctgggcctctctctgtccttgagaaacagccccaccttacaaggctgaagggaacattgaatgagtcagtgatgctggtgggtgcttggtacggggcccggcttacataagaaatctgtaaatggcagctgtcattgtggctactggtgtgttgtgtgcgttggaatctgtcagggacttaagagactgagggggttccaggagctttgtggggcagcattgggagtgtgaacccccatccaggttctcacctctcaaacttcctcagatgctgagccccacttataagcagcgtaatgaggacttccggaaactgttcagcaaactccccgaagcagaacgcctcattgtgggtgagtcccggacccccagtcccagctcctagcccagccctgtgactctccgccagcccgcgggcgccggctgagcctcgtgacttgggtgtcctcctgtctctccccgcccctctcagattactcctgcgccctgcagcgtgagatcctgctccagggccgcctctacctctctgagaactggatctgcttctacagcaacatcttccgctgggagaccacggtgagcccgcagcggggcagggtacaggggcgggggcccccatggccaggccccaccccgctcctattgaccctcctgctgtcctcagatctccatccagctgaaggaagtgacatgtctgaagaaggaaaagacggccaagctgatccccaacgccatccagatctgcacggagagcgagaaggtgacggaggacccggtgacgggaccacgcggtcccccgctcagcaggccgcctcccccaaacatgcaaagccccatttgttctgcaccctgagttctctccgagctgtccccttctctctgttctcccggcccaggcgcccatcacccctgacctgatccccgcaccagcctctcctctctttccctgcaacctgttacctcacacagctgctcaggaacagcagaaatagtaaaactcttccatgtatgtggcacctcagccgcccctcccttcgtaagtctccccgatgttgtgtcctgtccctgtcattgtggcctcatgtccgttggttgcaagatggctttctcaccagcggtccaacaagaagggggacaggtgtgggggacacttcccagcagacttctctttgtgttttgttggttaaaagtggatctggccaggtgtagtggctcatgcctgtaaccctagcattttggggaggctgaggcaggaagattgcttgagcccaggaggttgaggctagcctgggcaacatagtgagaccctgtctcttaaaaagcaaaaaattaaccaggtgtggtggcacgcacctgtagtcccagctactcactcaggaggctgagacaggaggatggcttgagcccaggaggttgaggctgcagtgagccgtgatcatgccactgcactccagcctgggtgacaaagccagaccctgtctcaaaaaaaaaaaaaaaaaaaggatcaactgaccattcttagtggcaaaggaggctgggcaagttccctgggctccccccatcacatcccagcccctctgggctgaccctgtctagagatgcatctgtcccctccttggactgggagctccaaggacagggccaggggtcgtctccccatcccagtgattctggaattgtccagggcagggccgggcgcaggacagacgttttgtggaactaatgcaggggtgaattagtggattcatggggccaaagatgtggcgtcagcgcagatgagggtggcgcttccccacctctgtcctggtcgctccccaacctgctcacacctctctctctctctctccctgacagcatttcttcacttcctttggggcccgtgaccgctgcttcctcctcatcttccgcctctggcagaatgcactgcttgaaaaggtgggcctgggtgaggcccgggtggggatggggggtttccagggggaccatggagccagggaccccagaacttgcggagctggaggcagccctggctcttctccatgggcaccaggcccagtgcccctgcagctcctccctgggccccacctgaccccgaagctgagtctctggcaaagggacatgaattggtgtaaaccgtcgtaattcttccctggggctgggaatgattttcaccctgaaggacatccaggttccactggcagcgggggagtgtggatagaggctgggaggtcatcacaggatgccggctatggctggtccacagcacctcagagagccccagccccatcctccggctgagcggcactcacgcgctgccttctcagaggctccgatgtccctggagcaggcaggagtgctgagggtcccattcagcatcctgagagagggacagcgcacagtcaggccctaaggaggacagggcagagccccgggattccagccccatcccctggggcaagtgattgaaccccatctgtcaaatgggggccatccccacttcacagcacccagaattttgcccagaataagtactcagtcatgtcagctcttatgagcagagtagcccagcggttagctccctcgccaccccctctgccccccggctgtagaccagctcccctggggtcacatctcagcactgctacttcctggctggaccccagcatgtcaccttgcacttctcagcaccattgtcttaaaaggatgatgaggttagcacctactttccagatggttttgaagatacagtgagttagtacatctgtaaagtggttagaagaatgcacctagttgaccaggtggcaaatgtctgctgctatcatcacttactgttaactgtcatcactgtcattcagccactctggccatgggtggctgaaagctcaaggctcccgaggacacctgggaaaagattcggggggccacgatggcataggcatgggagactcagccctggagtctggcagggcttgaccaagtcacttggtgaccttgaacacatgactttccctacatgacttccccttcctgggactccgtatgctctgtaaagatgggaacattcatggctgggcacggtggctcatgcctgtaatcccagcactttggtagacgaagacgggcggatcgtggtgcccacgaggtcaggagttcgagaccagcctggccaacatggtgaaaccccgtctctactaaaattgcaaaaattagctgggcgtggtagcacgcacctgtaatcccagctccttgggaagctgaggtaggagaatcgcttgaacccaggagggagaggttgcagtgagctgagatcacaccactgcactccagcctgagcgacagagccagactccatctccaaaaaacaaacaaaaaaagatataaaaaaaatgggaacattctctggccagagtattgtggggacttgggaagcaggaagtttgagtcctgggcgcaggccctggaggggctgtagcaggggattccccgcttgctgaggccaggtctggtgcgggagatcgtggctgcctccttgtggaagccaggggaactgcggaggccgagggctggtggggaatctggcgggccgggctctggctggggtgagatggaggccaaccccaggtcccgcctccccagacgctgagtccccgcgagctctggcacctggtgcatcagtgctacggctcagagctgggcctcaccagtgaggatgaggactatgtctcccccttgcagctgaacggtctggggtgagttggaggtcaaaggaggttgaagggttcgggggagaacaggacggtcggcgtgcagagttcctggagtgctggggggcctgagatggttgtatgacgtctggaggattcaggagggtgtatggggtctcaaggacacagcagtcccgcttcctcccctttcccacaggacccccaaggaagtgggagatgtgatcgccctgagcgacatcacctcctcgggggcagctgaccgcagccaggagccaagcccagtgggttcgcgccgtggccatgtcacgcccaacctttcccgagccagcagcgacgcagaccatggggtgagcggtgggttggaagaggggtgggatactgataggaagagagaggagggctgggggtgcagtgggagaagaacagcctgacagatttggaggggaatggatagggggacaggggaggcctggatggaggaacaggacagggaggggaagacggacatgtgacagggaaagagagacagggaagagaggggacagacagaaaggatgagagacagaagggatgggagatgggtggatagatgaagcagcagacagacagacggacaggacaggtaagaaagcttatggctcaggcatctgagacaagcctggcaggggctgagaggggccctcatctgggtggccccaggctgctcgcagctcagccgtgagccctcggtgcacacaccaccccgggtctgcacaggctctggaatccttgtggccagtgtggacttgggagccctggggctgggatggaggtggccaaggctgcatcgggcctttctccacaggcagaggaggacaaggaggagcaggtagacagccagccagacgcctcctccagccagacagtgaccccggtggctgaacccccgagcacagagcccacccagcctgacgggcccaccaccctgggccccttggatctgctgcccagtgaggagctattgacagacacaagtaactcctcttcatccactggggaggaaggtgaggcaggcgggcccaattcattcgcctccggtacttgcaagcctcgctcagtcttaagcaagaggggatggattcgcccgcagcactgagaatccaggggcaggcgggatggcgttcaggcgctgttgctagaaatctctgtctttactctgttttgaaggcagcatggcagggtgaacacaagcacagactgaaggcagcttgccgcggttcacatcctggtcacaccacttcctgaccatgtcacgtgggcaaattatgtaacttctctgagcttgctttcctcctctgaaaatggggttaacaatgataatacccacttcataggattgttgttaagagactataaatgaggctgggtgtgatggctcacacctgtaatcccagcactttgggaggccaaggtaggaaggattgctagaggccaagagttggagaacagcctgggcagcaaagcaagaccccgttttgtacaaaaaagaaaaaaaagaaaaaactaggtgtggtggtgcacacctatagtaccagctacttggcagaccaaggcaagaggatcacatgaggccaagagtttgagacaagcctgggcaacatagtgagacccctgtctttacaaaaaatttaaaaattagccaggcatggggtcatgcaccctatgtagtctcagctactggggaggctgaggcaggaggatcgcttgagcccaggagttggaggctgcagtgagctatgattgcaccactgcacttcggcctgagcaacagagcgagaccctgtctctaaaacgaacaaagggagagaattaagtgatttcatacatttaaagcacttgggccagttagtaagcattgactattagtatttctattatcattattgtattcattttctctctccactaattttcagctagcctctattcttgtctcttatggggcagagatggcctcagccctgccccagaccagcccaatgagagagagcagcctatttttcctagtgtctacagcggacaccctagggttggctctgattgggccaacttgagagtgtgcctgcccctgaaccaatcactgtggttgatcggatagacctgggccacccactcacccctgaaccaattgctgtgcccctaggttgatgctcccaggaggcgtgctatctggtaatgaatccctgtgatttaaatctcagggcctaggtgtgttctccacccagaaccaagcacagtggctgtctgtctgggcctggagcacgtgcccaccctcaacccatccctgagtcacaggagggctctgtgtcagtgtccagctgtgctccaggaggtggggtccgcccatgcacactacaaggcctgggagtggggaggcgtggcccgcagagggagggaggagtggaggcagtcatcatcctcggctctcctctgtctccagcggacttggctgccctgcttcccgacctctccggccgcctcctcatcaactctgtcttccatgtgggcgctgagcggctccagcagatgctcttctcggactcgcccttcctccagggcttcctacagcagtgcaagttcacaggtcagcgggcgcatgaaggagaggctgaggttacccaggtgcaggggaggggtgaggaagggtagcccaggacaggggaaggcactgctagccagtggggcaaggcgaggtggtgaaaagcaatgtctgtcagaccagaagcagctctgccacttactagctgggtaggcttgggcagagttctgagatgctctgtgcctcagtttctccttctgtataatgggggtatgataatagtacctggcttattggttatcatgagaactaagtgagttcatactagaaaagttcctagagcaataccatatagtaagcgtttaataaatacaagttaagaggctgaggcggggctggtgcggtggttcacacctgtaatcccagcactttgggaggccgaggtgggcagatcactagaggtcaggagtgtgagaccagccagggcaacatggtgaaacctcatctctactaaaaatacaaaaatcagctaggtgtggtggcacacacctatagtcccagctacttgggaggctgaagtgggagaattgcttgaacctcggaggcggaggttgcagtgagctgagatcacactgcactccagcctgggtgacacagccaaactctgtctcaaaaaaacaggggcggggggtggggtgctgggcacagtggctcacgcttataatcccagcgctttgggaggccgaggcaggtggatcacctgaggtcaggagtttgagaccagcctggccaacatggtgaaaccccatctccactaaaaatacaaaaatattttagccaggcatggtggcgagcacctgtaatcccagctactcaggaggctaaggcaggagaatcacttgaactcgggaagcagaggttgcagtgagccaagatcgtgccgttgcgctccagcctgggcgacagagcgagactctgtctcaaaaaaaaaaaaaaaaaaggtgggaggagggccaaggtgggaagttcatgtcagcccagaagttggagaccagcctgggcaacataatgagactcagtctttacaaaaataaaaaaaaaaattagctgagcatgatgctgcccacccgtaatcccagctactctggaggctcaggtgagagaattgcttgaacccaggaggtggaggttgcagtgagccaagatcatgccactgcacctcagcctgggtgacagagagagactccattaaaaaaaaaaatgctcctgaggcctccccagaagccgagcagatgtcggcatcatgcttcctatacagcctgtggaactgtgaacccattaaacctcttttctttataagttactgagcctcaggtatttatagtaatgtaagaatggcctaatacagagctcctcagcctgacacgccagcccttttaggacataagcatagttttgggggccttgtagccccccaacacaaggcaccatcttcctgactgcaggggatactgcatgtctcatcaatacagaaaaagaaacaaagagaaactcccatctgacacgctcctcccctgcttgaatctcttttgtagcctcccaagttccttggctggtcccatgtcaacccttcagcctcacccagagctgtggctgcccctctccatacctggctgccccatcccagcctcaggggacttctctcaatattggcctccagcctcagggcctttactggtatcacgcggcctcctgggctcctctgccccgaccccttccttcctcagttcctccttcaggccttggttttgatttcacatcctcctggcagccttcccttaccttcctcagatcccagatacccccagatactcacagcttctgcccttaactcacaccatgccagtagtgtgtggtttttatttatagatatttcctgttgttctcaagagattctgggtgctaaggacaggagttcatctatcctggtctcccactggcctccaagccctgcataggcctgacagagtggacattaaatttgtgatcattaacacatatttatttatttatttatttatttttgagtcaggttcttgctgtcgccccagctggaatgcagtggcacagtcttgagtcactgtagcctctgccttctgggtttaagccattctcctgcctcagcctcctgagtagccgggattataggcgcccaccgtcacgcccagctaatttttgtatttttagtagagacggggtttcaccgtgttggccaggctggtttcaaactcttgacctcaggtgatcctcctgcctcggcctcccaaatttcccgaagtgctgggattacaggcgtgagccactgtgcccggctgcctcagggagcttttgatcatgctgaaaggcaaagggggagcaagtgagagagagtggaggggaggtgccacacacttaaatgaccagatctcggaagaactcactatcatgaagacagcagcaaaccatgagggatccgcccccatgatccaaacacctctcaccaggccctacctccggcattggggattacaattcaacatgagatttgggtggggacaaatatccaaactataccaaactcagactctgttctaggggtactggggagccatggagtgttctaggcagagaagggatagagtcaggcttggctttaacaagatgcccctggaccagatggggagactgaggccagacactcaagggaaggctggcaggggcactgggcaggcaaagatgggctgaaccaggagtgacgctcaggaggtttggtgaacacacagtgtaggtaaccatctaggggtttgagtagggggtgtccagggcaaggcctaccgctccagtgggagcctggaggaccctgggccacccctgagtgggggcctgggagatgcagcaggtttggggagatgctgaggctgtgtggagctcggtgggttcgaggggtccagggaccttccaggggaaggtgttcaaaagattacaggtccaatgctcagggcagaagccaagacgggtgcagagggggaaactgaggctgcagcagtggaggagatggccctgccccaacagctaaggttttaggctcctggaaggaaggtggggacacagaggagtggtggggattgggacaggtccccagagagacctcccagaaggctgagtctcctgtggcctgtgggcaaaggactggggtgtggcctcctcatgctgctcctccctcctctagacgtgacgctgagcccctggagtggggacagcaagtgccaccagcgccgggtgctgacgtacaccatccccatcagcaacccactgggccccaagagcgcctccgtggtggagacacaggtgggccaggtggggcagccgagtgggtggggcagctgggtgagtggggtggccctgacttctccggctctgtccctgcagacgctgttccggcgcggcccccaggccggcgggtgtgtggtggactccgaggtgctgacgcagggcatcccctaccaggactacttctacactgcccaccgctactgcatcctgggtctggcccggaacaaggcgcggctccggtgagtggtggctgggcccctccacccgatgccctggtggccccagggcctcctgtccactcctcaagtcagcagcagagccttggttcccaccctggtggaggaacagaagcgtggggttcctgaggcccttgtcctccgaatagtggagggtagaggaagagtggccctgggatggctcctcccatctacagagggtgtttgagcctcaagactctgaggatacagcaaagccaggcaatatcacctctctcagggagctcatattctagtggggaattggacaatagagaaatgatcaggaaaatctgcagaacattcactggcagttaggcctatggagaaaaatgaggaaaacacggcaggctaaagaagcagggtgtggaggcttttacacccgacacgctggtcagggaagggcctactgggaaagaaatgtttcaccaagaacctgaaggagctgagagcaactcatttgggacagcaggtgcaaaggccctgaggcaggggtgtgggcaatggctggagtggagtaagattgagtgagtaggagctgagattaaagtggtgaaccggggcccggcacagtggctcacacctgtaatcccagcactttgggaggctgaggcaggagtatcacttgagcccaggagttcaagagtagcctgggtaacgtacggaagccctgtctctacaaaaacaattttttttaaattagccagggtccaggtgcagtggcttacgcctgtaatcccagcaatttgggaggctgaggtgggcggatcacttgaggtcaggggttcgagaccagcctggccaacatggtgaaacccatctctactaaaaatacaaaaattagtcgggggtagtgatgcacgtctgtaatccctactacttgggaggctaaggcacaagaatcacttgaacctaggaggtggaggttgcagtgagccgagatcgggccactgcacttcagcctgggtgacagagtgaaactctgtctcaaacaaacaaacaaacaaacaaaaaacaagttaaaaaattagccagacatggtggagatttcagtgagccatgatcacaccgttgcacttcagcctgggcgacagagcaagaccctgtctcaaaaaaaaaaaaaaaaaaaaaaaggtgaaccagatgtggctcatggtgaagacttgactttacctggagtgaggtgcaaccaggccagggctctgagccaggagggcgctgacctgactcaggtggtcccaggctccttctggctccctctgttctggtgggaacagactgcaaagacaggtacaggagcagggaggccagggaggaggctgctgggacatccaggctggaggggacggaggctgaatcagggtgaggaaatggagggggaagagtttagattctggagagattttgcaggtttagctgacaggatttgctgagagattggatgtggcggtgagggaaagagagctcaaggaatatcccgaggcatttggcccaaatcactacaacttcggagctgcccttgacccagatgggggcggcagggaggaatgggtttggggaaagaccaggaggtcagtttgggactcagctgtctatgttgagctgagcccatgtggagctggggtgcagcagccgaatggaagaggttcaggggcatggtctggttaagacgtcagtctgtgagtagacagggctcaggccgccgggagcgttgcccaggtagtgggcatgggtggagaaggaccgagggctgagttggctggcatttgggctgggcgggtggtgtatggggtatccagggaagccatggggggtagggaacccatctgttttgtctgtgagtgacaaggggccctctctgaattaggggaaggaaaaaactcagcttgtgggacggggcagccagggctggagtcagacccttacctccttcccctgatctcccaaccccagagtgtcttctgagatccgctaccgaaagcagccgtggagcctggtgaagtcgctcattgagaagaactcgtggagcggcattgaagactatttccaccatctgggtagggacagaaggccggctggggcgtgggttgggggatggcctggccaggtatggacatccagagccccctctcttttacgcagagcgagagctcgccaaggctgagaagctgtctctggaggaaggcgggaaggatgcccggggcttgctatccggcctgcggcggcggaagcggcccctgagctggcgggctcacggggacgggccccagcacccagatcctgacccctgtgcccgggccggcattcacacctcgggtacgttccgttggggccgggttggggtaggcggaggatcgggggtcctggactgggccatctgactccaagctgctctcctgcaggctccctcagctcccgcttctccgaaccatctgtggaccagggccccggggcaggcatccccagtgccctggttctcatcagcattgtgtgagtaagagacaggagcagtggccacacaggcctgaacctgcctcctggctgtgtgaccttgggcaagtgtgtggcctctttgagctctctgcttaagtgggagcgtgggtttgctcacagcaaggattagacaaggcaatgtttgggatgtgccggtttgtcatggagaagccttccctgctagaacagcagagccggggggggctatgggagatcagaggggcctgacctcacccaaggatcaaggggggctttctggaggagcaggcacacaaagattctggaattaggtgcacagggagaggtgtgcctaacaagtgaggtcatttatggacattatgttctctgtgcccactcctaagctgggcgatgctgaggacaccgcagtgaccttgaggaaaagatagacctcacaccagaccagagtgatccgggctgggatgggggaggtatgggcagaggggttggggctgggagtggggaagccctgggaggccagcggcggcttcctcccaggccagagggggcagtcaggatgggcgtcctgagagagtggagaccgcgtaggctaagggcttgggcagggagaacccacactcctgcccagaagcctgcaggagttggcgggcaggacgctgggaggaaacagaagcaggatcccggggttgagcagaccctgcgaggtgagggtcaggccagctacatgctcagcctctgagcctcagctctcagctctcatccagtgagggggcgtggtgctctcagccaagagctgccccgggtgaggagggctgggggtgtcgggggcaggccaggcggcgctcatctctctgtctcccctcactgctgctgctgcaggatctgtgtgaggtagggtcccgagtcctccccctgccctcccctccctgcaccccacccctgctgcagcctcttctccccaccccatgccccccagctcccccagggaggtggcctggcatggcagtcaagggtatgggcatcagacagacctgggtttgaacactgacttccctgctatggactgtgcaaccctaggcatgtctctcatcctctctgagcctaattctcctcctctgcaatgggggatagaggtgtccctacaagatgtagttgtttgggggtgttcagagcatctagaccccaggaatcctgacctctgacccctgtccccagccttatcatcctcatcgccctcaacgtcctgctcttctaccgcctctggtccctggaaaggacagcccacacctttgagtcctggcacagcctggccctggccaaggggtgagtgggtagcctggggaaatgggggggcttgggcacatcgggggaggccaaggccctgctcaggcctggcatccccacagcaagttcccccagacggccacagagtgggccgagatcctggcgctgcagaagcaattccacagcgtggaggtgcacaagtggaggcagatcctgcgggcctccgtggagctcctggatgaggtaggaggcgccgctcgggcagggctcggggctgcggggctgcagggtcctgtgttgaaaccccaccgtgcggcaggcacttcccctctccggatctcagtgtcctcctctgtaaaatgaggaagccgctcagagtccccaccccacagcattgcaggggaaagcatggaagcatggatggaagacagaactgattggctcacgtcctggagaaaagtccagaggcgtctcacattaggcacggccgggtttggtcactcaatggcagtaagagtcagtctctcgtgcccactctgccctgtgcccatctccagggttggcttcattggaggccacccttttccccccacaggggaccacggagcttactctcattggctgctggggtcccaggcctacccctgacacatcacaacagccagggcaggccacgtgtggtccctctacccgctaccccactctggggtaactaaggggtcacatggtctgaaggggagagactctccaaaggacctgaggtctcatctccaaaacggagtggacccagacacccagtgtagttcagggacaatgtctactcagacaaccaggttccaattccggtgtgtgacctcgtgcaagtgattttgccatggtggccgtggactcctctgtgcacaggataatgactgatgctacctcaaagactgttgtgaggatgagacaagttgacattgggagtggtgccaggcctgcaggaaacactggatgtgggctggctgtcctgagtttgagcctagtgccagggacaaagcagatgcccaataaatgtgatgtcatcacacgacaattccctcaggccccagtagactcaggccagcagttgcggtgggtcagagcaagtgtcaggccagcagttgcggtgggtcagagcaagtgtcaggccagcagttgtggtgggtcagagcaagtgttaggcactcggggaaggtgtcgagggggaaagcggatgggaaacagagtctggcattgcctgcatttccaaggccatcagagctgaagttgtgggtgacggtgaaaatcttgtctcattggacccttccatatcagaaggctcatctttaggggtctcattgccccccgaaatcaagcttgggagaggctcacactggaaagggcggggcaggatggggtggggaggagatgaaggctgaggccccatcactcatagagagggtaggcagggccccccatcctgcgttattttattttattcttttgagacaggatctcattctgttgcccaggctggagtgcagtggcacgatcatggctcatcgctgcctcgaactcctgactcaagtgatcctcctgcctcagcatcctgagtagctgggactataggcaggcaccaccacacctggccaattttaaaattttttgtagagaccagagtctcaccatgttgcccaggctggtctcaaactcctggcctcaggcaatcctcccgcctcggcctcccaaagtcctgggattgcaggtgtgatccaccacgcctggccctgagttaaatttttatcattttcctctctgtcaaactgctaagggtgcagagttgacgtcacagattggtgctcacagtagatgtagactgagcacttacctgcagctgggctgttctaggttttaagcatgactgctttatccccacagccagcctttgagaagatgctcttgttatcccagtttttttgagacagtctcgatctgtcacccaggctggcgtgcagtggtgcgacctctgccttccaggttaaagcgattctcgtgcctcagcttcccaggtagctgggattacaggcacccgccaccacgcctggctaatttttgtatttttagtagagacgggctttcaccatgttggccaggctggtcttgaactcctgaccttaagtgatccaccggtctcagcctcccaaagtgctgagattacacgcatgaggcactgtgcccggccgttatcccggttttatacataggtaggcgatatgaggcatccagaggttcgaggagctcaggagcttgcccgaggtcacagagtgggtaatggtgacagctaacatgtgctgagcacttagtgtacaccaggttctcagtgctcttcagaaccctgaaataatcctgtggagcagatgtgttatagacccgtatttcaaatgaggggattttggctcagggtggttacgggacttgcctgaggttaactgaggtaacaagcagcagagccaggatttgaacctaggccatcggggtcacaggcacacactaagccccttcctctgctgcctctgagaagttaaactgggtgcagcatggctgtgctcttttcaccaagggaccctggggtggggcagtatggcctctagaccgtcctcagtttctcaatggcaaggtgggggtgggcgacatcaccccccagcctccagcgttcacccccgaccctgctcacctcctccccgcagatgaagttctcgctggagaagctgcaccaaggcatcacagtctcagaccctccctttgacacccagccccggcccgatgacagcttttcctgaggaccccggccacgcagctgttcccccacatggacagatggacacacagagcctcggcggccactgctggcacggtgtgagcgccaggcatctcccacccgcccctcccgacggcccaaccaggggctgtgcagacgtggggaccacggaaccgagatgcactttagaccagggagctggcccggcctctggcaggccccccactaacttattttgcccggctgaggttgtggggggcgcctcctggggtgcacgattccctcagctctgggtttaatgtattatatttatttggggccgacagtgccccaataaagggtcagaagtggctgtggctgtgcctgtggggccctgggagtgggtgggagcctcctgttgcactcagatcctgccatggtggggaggggacctctgtctgtgttctggggccatagtcactgaaacgatctggaattcccgcagcatcttacacaagctttacatcatctgaggtcaacgcaggaactccggggacagaccgtggtagctggagttcaaatcctgcttcctagcagtggtgtaaatgcagcaggtcagccccctggagctccagtgagctttcctgtgcaatgggtagaatggcagtagctgtctctcagggttgttagaaggcagtggttctcaaacttgagctgcattcgaatctcctggagagcttgatgaaaaacagactgtgggcccctccctccaaatttctggttcagtaggtctggggcagggctgggattctgcctttataacgagttcccaggagttgctcatggtgccatcccagacgacactttggttttttgtttgtttgttttaagttagggtctctgtcgcccaggctggagtgcagtggcacaaacatggctcacagcagcttcgacctcctgtgctcaagccatcctcccacctcagccttctgagtagcttggactacaggtgtaagccaccacgcccggctaattttttatttctttttggagatgggatctcactgtgttgcccaggccagtcttgaactcctggcctcaagcgatcctcccgcctcagcttcccaaagtgttgagatttcaggcgtgagccaccacgcccagccccagaccacactttgagaaccactattataggttcaaggagttcataaatgtggctacttataacagggcccggcacagatggaatggagtaagtattcaataaatgttacacttattgcataaaaatagagggaaaaaagtaactcgcgtagtgagtaccaagtacgtacgtacccagctctgtgccaagatctgatgttcattttattctcacagtgattccatgaggtggagacaaagatgtacacgcccgaggctacccagcagggaggcagactccaggcctgacccctggggtctccacatttacatgcaaggtcctaaccccctcaggaccccaccacagcccattcaggctgacgttggttggattcctgttttacagatgaggaaatgagcttggaggcaaagtccctggtccagaaagaacccaggtccacctcacgcaaaccttgtcctggttccagagggagtatgtggggtagagacacctttggcatgtcacacccccggctataagaatcatcctaactgatggcttggagcaggggactggaggagggtttggagagtggatcaggagtggcataggaggcagagccagcctctcctatcctctagttgtgtgatcatggcaaggtacccatgctgagcctcagtcttctatatctgtaatatgggtgtaataataataccacctataggaaaaattaaatgagctaatgttagtaaagtgcttagaatgcttagaacagcaccaagcccatacatagtaggtgctcactgaacatagcttatagggccgtgaggtgcctcctgtccagtgctgaggcctgtcctcactgtgccttcacctaccatcccccaccagtggaagggcccggaacagcaagagggttattctctgcaggggaatttcacagctcagaaggtgctggcgtaaaagtctagaccacagaggtgtcggatgtccctggctccctgcccctctgccatggtcctgccccacaccctggctcctcttgcctggcagggctgggccagggggattctgagaccttaccccacccggaattggaggctaggatctgggtagtgacccttcagccgagagtctcactcccaccctggtcctgacagcccagaactcccatctccattctctcaatttggcagaacctactggtaggacaggccactcaccactgctggggcaggattccacatccatcctaggccagctacatgactctgggcaggggcacggccctctcccagcctcagtttcttcatctgtaaaatggggataatagaacttgctgaaggtttggggcagtagaagtgggttctgcaaatcccaaggacttagtgaacattggcattcatttatttgtttgacaaatattgattgagtacctacaatgtgccaggaacagttcaaggtgcaagagacacaagacaatatcctcacctgggagattttttttttttttttttttttttttttttacatggagtctcactctgtcaccaggctggagtgcagtggtgtgatctcggctcattgccacctctgcctcccgggttcaagcgattctcctgcctcagcctcctgagtagctgggactacaggcatgtgcccccacgcccagctaatttttgtatttttagtagagatggggtttcaccatgttggccaggatggtctcgatctcttgacctcgtgatccgcccacctcggcctcccagaatgctggaattacaagcgtgagccactgcgcccggcctttttttttgagacggagtttcgctcttgttgcccaggctggagtgcagtgatgcgatcttggctcactgcaacctctgcctcccgggttcaagcgattcttcctcagcctcccaagtaactgggattacaggtgcccaccaccactcccagctaattttttttgtattgttagtagagacggggtttcaccatgctcgtcaggctggtctcgaactcctgtcctcaggtgatctgccccccttggcctcccaaagtgctgggatagcggggggcggctcacatctgtaatcccagcatggtcaacatggtgaaaccctgtctctactaaaaaataaaaaaattagccaggcatgatggtgcacacctgtactcccagctacttgggaggttgcggcaggataatcgcttgaacccgggaggcggaggttgcagtgagacgagatcagccactgcactccagcctgggcaacagagccagaccctatctcaaaaaaaaaaaaaaaaaaaaaaaaaaaaaaagaacataatgtcaggtagtgaggctgctgtggaaaacactcaacaagaggtaaagagtaaaggaggtcaggttaggagcggggaaggcagtttaccctgaagggacacagaagacctgacgaaggtgacattggagccatggaggcccacggagaggggcggggcagggggggagagccggggcagaggggagagctggggccaaggccctgaggcaggaacgggttccctgtgttgggaacagcaggagggcctgaacagccagagtggagtgggaggaaagaggggtagaaggtgacatcagggacataaatgggtgcaggggatcacgaaggggtcctcctcctgaaacagcacctccagattcccggggctgcttctctccagggtgccccgcctgcttgggtgaggtccggattgtagctgtagtcctagcctgacggccccccaccctcctctaatgcctacttggggtccctgcacattgacccccaggcctggatatcagggctcaggggagataacttggaggttcgccctctggaactcctgaggatgacctccatcatttgaagtcggaaacccggcccccaaactgcgctctaagtcctcctgtgactctgggggtgacctttccagactccctgggaaggtgggggggggggggtggtcctcagagccccagcggggtcggagacacacagaccaccctccccgttcccagaagtcgcggtccctgcgccacccggagaggccggtgcagcgggcgcctcccgggccgctgcggcaaaggctgggcggccgcgccttccccccgcggtgattcatcccgccccctccctctcctccctcgtccctccctaggccgccgccgccgccgccgccgccgccgctgcagtgcgcaggagaccgcggtccgcgcccgagcgcgcccgagccggagcgggaccggggtcggtgcacctagcggatgtgcccggctgcgcgcgccagcgcagcagcccgagcagcggccgccgcccgcgcggcggggatgcccggacgccgggccccggggctgggcccccggcggtaaccggagcgggggggccgcgccccccctcctcccccctcgccggtcccagagccgcagctgctgcgcccgcgcgctcccggggacattctaaccgccgccaggtcccgccgcctctcgccccgctattaataccggcggcccgggaggggggcgcagcacgcgccgcgcagccatggggaggctgctggccttagtggtcggcgcggcactgggtgagtgcgcggggggcgcgcgcggccggggggcaccgcgggggcactggcggggcggcgggagtggcgctcgggacacggggcagccgcgcgagggccacccccggcccatccccgggccccgccaagtcagcttcagaagttgtgcgcgcgggagccgggcttggggagggcagtggaggtgagggtgggctccagcgggtgggggccgggctggcacagcctggcggctgcaggcgcccagccgggggcgaggaaacgcggagtcagctgctcccggagccccgcaggctgcaatgtgacacccacagccgcgggaggggggtggggggaaggcggcgcccggagactgggacgggaaagacggagggacagggagagatgaagacgggaggaagggggcgagagacagagaaggactcggagcgcaccggagtggtccgctgggatgctggggacatgggggtcaagggggagacggagacagagagaggggtattggagagagagagagagagagagagttaagagactgagcgcgatggagaaagggaaacttgagaaaggcagaaggagatggagagaagagagagggagatgcgggtgcccgtgaacaccgggagagaatcttgcatggagtttgaaaagggatagacgtagaaaggtggaaagagattaggagaggtctccttctgagcccagagagtggacaaaaagtggagggaccttcagagagacccctgagagggacaaagataggagggactgagacagaggccctcagggagtctgaaagggaccgcaggggaggcggatggatgagaagtcctgaggatcaggaaacaaggacagcacagggctgcagcagaagagacacagcgttagctacagagtgctgggaggcagaaaggaggtgccaggtaagagtgtgaaggaattctaagactggaattcagtgggctgcaaaagccctggggcaggagagagctcaggaaagctttgagtagtggatggggttggggtgggaagagctctagaggcgaggagcctggggaagaggggatgatggaggcaggagaggccggggaggggatggctcacacaggggcttgtgggctgtggagaggggctgagtgtgggtcagccccggtttcagtgcccacctccccacaatcccccacccccagaccttttctcccaacccatttctcctggagctagctggttttacaatttaatggtgaaaatgactgccaccttaaacttctaacttagctggaattctcattctaccacctagatgcttgggttcctccagcaagggactttctgaggaaggggcactcgggtagcataaagtctgagttaccggcaacgttgacagtcccacttatggggcctcccatgtacaaggccctacctaatgtatgaaaatgggcccagccattgctggaagcaaaggaccatttctttcaacaagagagagggaaactgagactcagggatgaatgacttgctgaggtcacgcagtgagtgacagggctcagcctagcatccagtcctgtctgctggtaatcattgaggggggaacagatggtttgtgaggggtctggcattgcttagggcaatgggtgcctctgcctgacctgagcctgctgtccccacagtgtcctcagcctgcgggggctgcgtggaggtggactcggagaccgaggccgtgtatgggatgaccttcaaaattctttgcatctcctgcaagcgccgcagcgagaccaacgctgagaccttcaccgagtggaccttccgccagaagggcactgaggagtttgtcaaggtgtgcgggtgccgggaacgggcatgggagggcaggggtccacgagtgggaggcggtggggctggatctcagggagggggcttatttgtttaataatatgctgtgattgctgacctggattcagattctggctccaccagtggccagctggtgaccttggccaagtcagtgagcctctctgaaagtcagtttcctcctcggtaaagacggggtggcggtggtctctagcccataggtttgtgtgaggactgaatgcattgacgcacctggcacacggttggcatgaaataaatgtcagtggacttatttggcaccagcaaacaatgtctctgatagtcattacggagggaagacagaactgttttttttaacctcctttaaactatgtgtgtattttgcattatatatcggtgagggaaccataaaattctgtgacgtgctggagagttggggtctccagctgctggaatcaggctgccctgtctctgctggaggagtgtgtctggtggctgggaaagaacggcagagaatgatagcctagaggccagatggggcttgggaggatgactgaggaacgtgtgtgtgctcgtgtgcatcttggctagaggcaaaagcggggtctggttgactccaggcgtgatcctagccccccacccctgtgccctccctgcctgaggtcaaggtgtctgagcccatctgtgtgccatctgtgtttgtgggtgtcagggcaggggacagaatcagggtcaggtaagggaagagaggcccaggcagtgacaccttcccctccctggctacccctagatcctgcgctatgagaatgaggtgttgcagctggaggaggatgagcgcttcgagggccgcgtggtgtggaatggcagccggggcaccaaagacctgcaggatctgtctatcttcatcaccaatgtcacctacaaccactcgggcgactacgagtgccacgtctaccgcctgctcttcttcgaaaactacgagcacaacaccagcgtcgtcaagaagatccacattgaggtagtggacaaaggtgagtcgggtgctgcctgcccctttaccgtcacccaccggagagccagatggagggacagatggcaggcagtggacaggacaggctggctctgtgcctggccagccaaccgcccacagcagcgggctgagggggaggggagcagcccctcctgcccactccagctctggcctctgtttctctccagcccacggagaggtcaaagcatgcctgtcccccacagacgctccgggtacagaacccagctctgtcacctgtgctgtatgacctctggcaggtgccttctgtctctgagccaaagggttgtcctgggcttgcccgggataataatccgatgtgtttctcggggtgtggtttgagccattcttccatcatggggttcatgaggattgagcagctgcaggcacacgcctggcttccagcagagccttgcaggtggtggcgagggtggcggttcttactgttcgagtagctcagccctgctgccctctgtggtgatgaggcaagagagcgtgccacctagagcagagttccgcacacccctctgcactcctgccccgggggagccgcgctggcctgcagtctcactcaacacctctggggcgggcctaggggtcctttctaaagctctcaggtgaggcagtgaagggccacaggtgcggggcccaccctctgagcagcaagggcctacagcgcttttgaacgtctcatcattttgcctcagccaccctggaccccttttctgagggaggtccgccccttctctgatccatcttctgctcagcatcaattgcaattgtccagcgccctgtggccactggcttagagttggggaaacagcccaggccttgaagcagctacaagccgtggcagaaaggtctctcagggccacggcacacacatcctcatgggcaacacgcactgcccatcttttctgtgagatgggtgccggcctcagtgccttacacggagtcccttagtgaatcctctccccaccctctggggtaggggctcttcctatccccattttacggatgagaaaaccaaggctcagggagggaaggttatgtggccaaggtcatgtgattgggagctggacttgaatccagaggagcttgggtgactgtgtttctgttcttggcatgattcactgtactctgtgatcagccagagcctgtgggtttctttttataattagcatttttacgtttattgtcaaattggtgtagcagaatgcaattcagcaggcatgtctgagccactctggtgtttgtcacgatgctggggggtgggggtcacccgcagacatggatgatggagccccgcctgcggagttgctgtgacaaagatgcctgcggtactgggactttacaaaacctgtgttattgctcttgcaaatctgcagaggtgagatggggagagggtgggaggctccagggcactgttcagccacccaggttctttccatcttgttgtttggcagttggccagggtgttgtgtcctctgtacgccgtgacccaatagagcctctttttttttttttttaaatttagatttttattttttgagacggagttttgctattattgcccaggctggagtgcaatggcgtgatctcggcccactgcaacctctgcctcccaggttcaagtgattctcctgcttcagcctcccgagtagctgggattacaggcatgtgccaccaagcccagctaatttttgtatttttagtagatatggagtttccccacattggccaggctggtctcgaactcctgaccttaggtaatgatccacctgccttggcctcccaaggtgctgggattacaggtgtgagccactgcgcctggcctgagcctctcttttttaggattgcccactgtatgacactacatcccacagcctgtgctattaccagcatttaccatcatatgcagttccttatgttggccctgcagagtttgtgttttctgcactatccacccagttctagtgttttttacccaccatatgtagtattgccttttaaacattacccactatattatagtattttatattacccactataggatattttatattacacaatatattttactatcataatattgccaaacacaacagttttttgttttttgttaaagagaccaagtcttgctctgttgcccaggctgggatactgtggcgtgatcatagcccactgcagcctcgaactcccgaaatccagcgatccttctgcttgagcctcccacgtagctgggactacaggtgtgagccactacgcccggcaattttttttttttttgtagagactggatcttgctatgttgcccaggatggtcttgaactcctggcctcaaataatcttccctccttagccgccgtaagtgccgagattacaggagagagcctccgcgcctggcctacagtatttttattataatccatcatactagcgtatttttaacgttccccaccatggcgggtatttttattacccaccatgctatgctatagtatttcaaaaattaatcctattgtagcatgtaaaaatattccattctataccatactatattcatcattacctctgatactacagtatttttaacatgactcattgtgctattgtattttttcattacccacaataccacaatattactgtatttgttagcactgcctgccattccttattattattatttttgcaatggagtctcgctctgtcacccaggcaggctggagtgcagcagtacaatgtcggctcactgcacctcccgggctcaagcgattcttctgcctcagcctcccaagtaggtgggattacaggtgcacgccaccatgcccaactaatttttgtacttgtagtacagacggggttttaccatgttggccaggctggtctcgaactcctgacctcaggtgatccacccacctcagcctcccaaagtgctgtgattacaggcgtaagttaccatgcccagcctattattattattattattattattattattatttcaagttagagtctcactctgtcacccaggctggagtgcagtggcacgatcttggctcactgcagcctccatccacctcccgggttcaagcgattctcctgcctcagcctccgaagtagctgggattacaggcacgcgccaccacgcccggctaattcttttgtatttttagtagagacagggtttcgctatgtagaccaggctggtctcgcactcctggcctccagtgattcacccaccttggcctcccagagtgctggaatgacacgtatgagccaccacactgacctttttattatttttatccaccatctcgctgcaatttcagtattgcccatcgacctatattgcctcctggtaatgacccctgaggaatgagccatgccatttccataggtggaggcgacgggtcatggtggtgagaacttcactgacctggaagaggtggagaagatgctgggaagctgctgagggctgcccacctgtgttaggagaaggcagatggggacccatggggacagtaatactattttggatccacacaacgggagtggaaaatgccttgaggcacagcagcgtctgaggcgggtgagaaatccggcctgcagagtcgcggctggccttcagatctgcgggctgcctgtgagatgccgtgttacctaaatccatttgggcactgagttccaggagtgggggcaagaattccgatgacggggctttatccggtgcgcatccagctcagagtggttcctgagaccagccaccatgggcagccaggatgtgctcatccttgaggctttccgaggcatcaaggagatggttggataaagaatttagcacagagcttgactgatggcaggcgcccacaacatgagacacattaataatgtgtgtggaggccaggtgtagtggttcatgcctgtcaccccagcactttgggaggcagaggtgggaagatttcttgaggccaggaattcaagaccagcctgggcaacacagcgagacctcatctctaccaaaaaaaaaaaaaaaaaaggaaaaaattcacctggcctagtggtgcacacttgtagtctccgctactcaggaggctgaggcaggaggattgcttgagctcaggagttccaggctgcagtgggctatgattgcatcactgcactccagtctgggcaatagagcaagaccctgtctcttaaaaaaataaagtctgttgaaaagaatgaatgaaggaaggaaggaatgagagggaaaccctgtctcagctcctcccgcagggaagctggggcagggcaggcagggggggcatccggccccgctccctcccttactctggcccagaaagcactggtgccatctgcacagggtggagccaaagaaagtgccccactcacagcagagggaggccatttgaggacagcagggaaaatgggatctcagccatctaggagggggccagagatgtgggatggacacctaggaaatccagccgaggacaccagagtggcttttgactctggtcccctggctgaacgcgttccctttacagtttaaatttaggctcaaggagaagaagctggcaatcggcagggccagtgctgtagagaggatgtagggtttccggaaaatagccaacacttcagcagtgctggctgcgagctcatccaagcatgttacgggtgttaactcatttcctctccagcaaccctgtgagagggtctgagtgttcccatctccattttacagaggctcagagaggtgcagtcctttgcctgaggtcacacagctagtaagaggcagagccgggatttgaaccctggcagtctggccctagagccccagctgttaaccattaggctttatagccccagttataacaacaataataatactaatacaagtgaaccttcactgagtgccatttatagatcaagcactattctaaggattttaaagcatatttaattctcacagcactctgatgaaggaggtattcattttacaattgaagaaacagaggcctagagacattgagtcacttgcgcaaggtcacacagctggccagtggcagagccagcctttgaacctgagccttctggttgcagagctacggcttttaggcaccgtgctgagggcctccagaatgacacagatgtggcctcgagttacacagggaggcaggttgagggtgacccccaccaggcctacccaaggctgggtattaataatcacagtgcatacaccaggcccagggaggttgagccactcatccaagctcacacagcaagctcacagcacactcaggctgtcatgcagcctgggctacccccttaaccctgcctggcccctgcagccaacagagacatggcatccatcgtgtctgagatcatgatgtatgtgctcattgtggtgttgaccatatggctcgtggcagagatgatttactgctacaagaagatcgctgccgccacggagactgctgcacaggagaatgcgtgagtagggtggctgggaggtgggagggcacccagggcaccgtcacacttgccagagaggaactccggagcccgggcagggaggaggcagcggagcggcccagggcgccatctctcagtactacccagaggggagtgctccctgtcagacacaggataggggtcgtcagacccagccccttcctccctccaactcaggagcccaggctcccagccagattcctcaaagaccctgaggagtccacccatagactccttctctctctaactaaggagccctgtgtacctggggtggagaccgctaccttcccccatcccccgggggttgggtcggtctgatgatggggtcactgtatacctggcctttcccccacagctcggaatacctggccatcacctctgaaagcaaagagaactgcacgggcgtccaggtggccgaatagccctggtaaggcggatgggctggcagaggggaaggggattgggaggggccgaagtcccccaggtccctaattccccctctcttgctccccttcaggccctgggccccgcctcaaggaagagccagccgtaatggggactctccaggcaccgcctgcccccagcgtgggggtggccactcctgggccccagaaagcctcagagtcctgccgacggagccactggggtgggagggggcagggggcttggctcgcacccccactttcgcctcctccagctcctgccccgccggccgcgcaccgccatgcatgatgggtaaagcaatactgccgctgcccccaccctgcttctgctgcctgtttggggaggggggcggtgaggtgggggcagcggccccgcacccctcctccttgctgatttgcacacattggccgcttcagacacgcacttctggggccagcccctccccgcctcctccctgcctggcggcaggggtcgcgatgatgggctggagcagtttggggcagggggttctgggacccactccgactccccctccccggcatcatttcccctcccgcttcctccggctggacctggggtcccccctccctgtaatgcactcctgccccggcccaacctcgccctctctcaccagccttgaactgtggccacctagaaaggggcccattcagcctcgtctctttacagaagtagttttgttcatgaaataaagactcttggacttgatgcatagtttcgattgtgagccccgtcaccttccccccattcccgtccccgaatcttcgagcccgctttccagggaccctacctgagggcccacaggtgaagccacttagtgcctgatctgtgtcggggttgggggagccatgggctcaggggtgagggagagtggaacggagccaggaagggagggggtgccgtggagggaagagaatcgaggctgatgctggggtgcaggggtggcatggggtgtgtggtgtgcccagcagtgtgagtctctggagaggtgggcgctggggagaaggagagggaaggagagacgggtatggatggaaaggcagaggaagccaggctaaaccagcgtgtcccaatgaggggccctgggctgagtggaggaaatgggtgcggtggaggtgggtttggctgggcacagcgggcacgtgtgggtaagcgggtggggccggttgtgcgggtggcctatctggggcaagcagccgaggccgactgtgtccggcgtgtggttgagcacgggcaggtgtctggcggtgaccctgcacgtctggtgtttacctggccctgggtctgacgtgggccgcgcctggctgctggcgggacagtgtgttatctgcctgcggacgcttccggccacttggcctgggcctctgcccttagcgctgtgttttcccggccaagccccccatcccccctatctagtgctaggactttctggctccagaggtcaccgcggccgggcggaggctgccaaagcaaaccagccccgtgacttgtaggaagccagcgggggaggggccggggcaggatgagcagggcaggcgggagaggctggggctggggttggggcccaggaattgggcagggaattaggcagaggtgcagcaagtggcgggcacagccaggacctggggctggaggacgcagaaagggcggggggaagggttcgctgggtgagggtggagtgggcttagggcagctggggccctccatctgatctcttctggtcagacccccacccttcagcctgcactttctccctaaacccccagcctccggccaggcctgtccctgttcccacatccccgcagacaggcacacctgggtccccctggaggtccaaggcaagccccgtagctgggcccgcctggtccagcccccacaagcccggccccatcagccaggtggcctccagtgctgccaatcgaatggtccggcccctccccgccccttcacccgcccctcgcccagccccctcctcctcaggtgaggcagcctggcctagcaggccccacgccaccgcctctgcctccaggccgcccgctgctgcggggccaccatgctcctgcccaggcctggagactgacccgaccccggcactacctcgaggctccgcccccacctgctggaccccagggtaaggacaagggcccccagactcacagttccagccctgaggacaggggttccctcatccccccacccagcctaatgcccacctcctaatagaggggttcctggggacctgaagagggggcactatgacgtccccccaagcacctaggtgttctgtcctgctcttccttcagactcagccgttggaccccagtcctttcctccccagacccaggagttccagccctcaggcccctcctccctcatactagggagtcctggcccccaaattcctcctttcccaagacttatgatttcaggtcctcagctgtctcctccctcaaaccgggatcctcagtcccctgctccaccaggctcaggcatgggggtccccatccctgcaaatccaggcgtccccccgctgctggtcagacactgaccccatccttgaacccagcccaatctgcgtccgtgatcacggcgtgctctggccaaggcccagtccctacagcctgcctggatggacgcctgggactgggggcgccaggactgggctgggctgggctcccccaggccctgcctccccgtccatctcctcacaggtcccaccctggcccaggaggtcagccagggaatcattaacaagaggcagtgacatggcgcagaaggagggtgagtccccttccctgagccccagctttggctctgcctggcgccccgccctctgtgctcttttctctaccctctactcttcggagccccctctctctgggcacccctcccagatgcatccccacccctgttagtcctcctccacctgattaactattaaccacattttctgtgcagctgtgccaccaccagcctcccttctaccctatgtgaccttcctggcgtgctgcctcagtttcccctcatcccccagtgatttctcagctaactctggacttgtcctctgctggggctgaggcggggaagctgtagctgtcatggttaaggacacagatttggagtgaaacacacaggcttgcatttgaatttgctcttgccatcttttttgctgtgtgatctggtgcaagtgacattattcttagggctttggtctccctctgggtcaagcatggataccagtcctccctctgtgaggttgctgagtgcatgacacacaccaggcactggtctggggctctgcatataagacgcatgccatcaagcagagctgtcatgacagaggttggcaaactcggagtcccagagacccaggacccccaccgatcccagacattcctccacctcctggctctgtgggcaaaagagcagagggaggactttggactgggcctggatggatggagaggggagagacggcagagaaaccaccataaggatgagagagagagactgcgtcatggagttgctggcccttgggagtctctgggcagcccccagctagcctggcttcctttctacctctcacacatgggacccagctggaggggcgcatggaggggcgtcctgttctttctgccttcccctagctggggctgactccctctcttcttccgcaaccaggatagccgggctcagtcctgggcagtagcactttctagctgtgtggccctgggcagacggcgtgttctccctgggcctccattctctcatctgtgaaatggagagggtgacagtgcatgtccaacagcgtggggcgaggcctgaaatgccaggatgggcaggaagcactgagcgtgttggctgaaatgattagttcagatctctggcctcctcgggtctcggcacagctggcaattcagaccccaaaccaatcagctgcagtccagagggaacccaggctcccagttactcaggagaaggcattgcaccctagccgagcaggtggatgacagaatccagctccttggggacaatctctttcctggagctgccggaaggacagccccagggcttgggcccatgggtgaatgagccagggaagaaaagcagaaaatgcccgaatggacagagatggcctgggtacaaagagaaacagacacaaagtgggctctggtgcctccctggcagctccgggctggtcttggaggggagtcctgctgtcagggctaggggtgtggaggtcgaacctggacacagatgctgaagggttccgattctgcacttacttgccgggtgacccgggtttggtggctgccggactttgggcctccttttctcatctgtaaactgggggtgatggcaatggcgccttcctcgtgaacagctgcaaggatttaagtaaggatgctgtgcaggactggacggggttagggtagggcggtgcgtccgtgtgtgattcagagagccgttgtggctgcagcggctgctgttgttggtgtcactgttattgctgctggcttcttggtgctgcctggaaacttggaattggaggaggtgatactggagttgcaattccaaggatgccaggcagagggaagagcaaggctcttgctcttctctgggaagctgggaggtgacacagcactggtgtgcacgtagccaattgtggtatttctggaggtgaagctggaagttgagctgggtgggagaagaggtgtgcaagctggaccaggcaggggtgggactgttttggggaagagctggccaattccttgcagtaccaggtctctccacaaggtggcgccagtggttagtccctgcttctcttgtctaacttgtattttacaagttctactgtttgggttgctttttggaagctctctctggtacctgatagtgacccacatggttgtctgagaattgggggaaacatactcccaaatctctgaaagccatgcttataccctagtggggctggaaatgccaggctgagggacttaagctgtctggggggtactagggagtcacagagggttctataggtaaagaggggacaggttggatttggtgtctcagtaggttccccaagcctccgtgtggagggtgcgctagaagggagactgagcccagcggttggatggggccggagcaaggtgcagatggagagaaagaaggaaacgggggaaggagagtcactcaggaggattggcaggctgtcgggggaggggaatgttatgcagatggggatggtcctaggagtgagggcctctgagacaggaccgggaggaagaatatacttggggagacattggggagacattctgggacctggtaggggcaaagggactaggaggtcccagggaaaggtatttaaaaggtatttaaaggactgcaggagccctgacctgggacctggaagagggtctagggctggggacagaggggaaactgagtccacagaggtgggtgagacagacttaggggcaaggaggagcagggggaggctgcggccagccctacaaactctggattttacggagtaggtagagggtgggtgaagacagcagcctcagaggcgggaaggaaaatcaggtgcgcctggtgtcccagaagtccaaagaggagagcatttatacaggaagctgcagtcatgtaagatgaggcccgagacacggagccaccagttgagtggattttcagagccagagagccaaaggtgttacgcgtgggggtctttgcagccaaatggtggaggcggaagaactgacctatgagaagacccaaggcatccagaggggcctggagaagcaggggcagagagtctcagggagatgtaggggtgggggaggtctggcttaccaagggaaatagccctgctgctgggatcaaagaattgatgttgacgtgccgcctgtcccagtagagacacgcagggaggatgaggatgcgtcccacaccctgggccagatgaggatgctgcctgtcccagtagagacacgcagggaggatgaggatgcgtcccacaccgtgggccagatgaggatgctgcctgtcccagtagagacatgcagggaggatgcctctcatactgggggaaccccaggatgcagatgcttcctgtcccactggaggcgctgaagtcctctgaaccacacagcatggaaggaggttcttcctctcaccctaggagacacatacatagtggcattgcttcctgtcccaccagatgtgccaaggcctctaggctgcattctgcatggcctagagccctggcaggcacagctgaaaacaaagcaagcaagaccagcccagtggctgtcgggagccaagacctcctgctggaacctggagagtggtcctgggcagagttggggggcaggcctgagaacccctcgcaggacaggcaggggtcagccggcagtagttgggctggtctggcccactggggcctcttttggggaagagagtgtttcctcatgccttgatgggagccactgagctttcaatttttttttttttttaatacagagtctcgctctgttgcccaggctagagtacagtggcgcaatcttgattcactgcaacctccacctcccgggttcaagcgattctcctgcctcagcttcccgagtagctgggactataggcgcccgccaccacacccagctaatttttgtatttttagtagaggcggggtttcaccatgttggccaggctggtcttgagctcctgacctcaagtgatccacctgcctcagcctcccaaaggaccgggattacaggcatgagccaccatgcccagcctgagctctcaaattcttaagacacccagataatggccacaccaggaaggtcctagaccactccctgctctgttccaggtgctggcctggtgccgggttcaccagccacatcaccatgggtgcagatgggcgagctgggagctcctgccaccttggggtgctttgcggctgccaagggcagttgaacccaagccaggcccagctgaaggctttcagcagcctttactctttggccttcttataatccctagtgaaggggttggcttttatttatttatgtatttatttatttatttattttttgagacagagtctcgctctgtcgcccaagctgaagtgcagtggcgcgatctcggctcactgcaagctctgcctcccgggttcaagccattctcctgcctcagcctcccgagtagctgggattacaggtgcctgccactgcgcccggctaattttttgtattcttagtagagacggggtttcaccg[138 bp omitted]ataaaatcccttttcctgtgccaccaggcctccccagctggccccagccttggttcccactaccttccccaagctctggccatctggccatctcgatggcctctccagcctctgacataagagagcctgcttattcttgcctcaaggcctttgcctgtgctgttccctctgcccacagtgcccttccttgtggtctgtgtgtggctggcacctcacctttcagagcttagctcagaagtctcctctaggggaggccctgtgatccctgatcccctgcagaagcccacctgctgccccagcctgcacggttttcttcacagcctctgccacaatctggaaattattgggttcatttacttgtttccttgttaatgtctcccactccccacctacacgcatgagaacgtgaacccctgagagtcgtaaccttatctgtcttctttgggttatgttcccggaacctagaaaggtgccaggcacacagcggatgttcagtaggatggtaaacaaataaagcttctttaggctgatgaaaaaactgagggtcaggcgcggtggctcacgcctgcaattccaacactttgtttgggaggctgagacaagcagataacttgagtctgggagttcacgaccagcctggtcaacatggcaaaccccgtcaatacaaaaaatacaaaaattagccatgtgtggtggtgtgcgcctataatcccagctactcgggaggctcagaattacctgagcctgagcgcttgagactgcagtgtgccatgatcgcgccgctgcactccagcctgggcagcacagtgaaaccctgtctcaaaaaaaaaaaaaagaaaaagaaagagagagagagagaaaaagaaagaaagaaagaaagaaagaaagaaagaaagaaagaaagaaagaaagaaaaggaaggaaggaaggaaaagaaaaaaactgaggctgaggctcagagaggggaggggagttgctcaggcccacacatctctgatgatttataaagcatttatagagaacttgctatgtgccaggcacttccgcacagtgagagccaggatggcttcgtggctgtacacaggggacctggcatcaaacctgcccagggttctggacgctgctctgcctcttccaggctgtcactgtgggcacgtgaccccacttctctgagctatctcaaaaacaggaatcatagttgtgggattgaaataaggactaaatgagctgatgtatttagaacggtgcttagcacctggaggcatcaatacaatttgagctattcttcttcttcttgaaaataactttaaattattatttttagaagtaggtgctcagtggatgcccatttaatagataagaaagttgaggctcaaagatatgatggcacctgccttaggttccagctaggaaggggtagggtcaatatttttaaatgaggctggccagacgcagtggctcactcctgtaatctcagcattttgggaggctgaggaaggaagatcgcttcagcccaggagtttgagaccagcctgggcaacatagcaagaccacgtcgctaaaaaaattaatacataaaataaaatgaggctggcagattttcaagtggaggggcaaatttgatcttgcaactgggtaccatgagagaggtctgatttagggggtatctaggggcaaagcatctagaacagcagaaacgactgaggcagcgaggaaatgccagcggcagggaagagagctaccaagagggcaaaggttgggggtcacagtcccaagaagagatggcccaaagcaaagacagaaatacaaaagcacagtgtcactggggaggagacattccctaagtgccaggaaagtgcagggcggaggtggagaccgtggcaggtggcccggccatgcccccctcccagctggaaccctgggggagctgggcacctggttgttcacacggcaggggaggaacagccctgtcaactgctggccccgggaaactgggcctggggaggacatgcttgggcataataagttagccctgggggcagggcagagctggcctcgggcccagaccctgccgcaatgaggacaggcctggctgtggccccagcatggtgtctgttgcaggtggccggactgtgccatgctgctccagacccaaggtggcagctctcactgcggggaccctgctacttctgacagccatcggggcggcatcctgggccattggtgagagcggttcctgtgcctctgacctcccctggcccctgcagcctccagcctgcctgccctcacccctcccttctctgcagtggctgttctcctcaggagtgaccaggagccgctgtacccaggtgagtggagcaggctgggaccctctgggggagccctggaggacacgtgtatctggcgggagctcaacaagcgtatttgttgaataaatgcacaaatgcatgcagaaatgctaatcataatagtgcatttgtattgagtgcctgctatgtaccaggcactattctaagcaccccacatgtctaacccagactttttcagacaccagtgtattactcatgagtgcctcataaaattaaattagtgagttggaaaaccatgttttttttttaagtatgaaatagattcgattacagactatcacagtacatctctcagtaagtaaaggttatgctaatttttgtttgtttttttttttttttgcatccatatacatgtaatcccactgcatccccacactctgagggtgggactgttattctccctgttttacagatggggaaactgaggctttgagcaatgcagcagtttgccccagactacagagctatgggctacatcaggatgtaaaaatgtgtttcttactgcgtggcatggtgaaaacatgttggggaggcatgatataaattcagtggacccttctaactctcctaggaggtagtttttttgtttgtttgttttaaaaaagaaaaaagtcttgctctgtcacccaggctagagtgcaatggtgcagtctcagctcaccgcaacctctgcctcccaggttcaagcgattctcctgcttcagcctcccaagtacctgggaatacaggcgtgtgccaccatgcccagttaattttttgtatttttagtagagatgagatttcaccatgttggccaggacggtctctatctcctgaccttgtgatccacccgcctcggcctcccaaagtgctgggattacaggcatgagccactgcgcctgtccctggtaattagctccattttacagatgtgcaaaatgaggaccagagaggacatgcagctggggaacgaggggccaggaacagctcttagacttatccactgtaagtgtgtctgcaggcatgtggaatgaatggccacacaaataaatagataaagaaactaactgtgggatgaatgaatgaatcttcccaaatgccaacttcaagctgccattccctgatgcaggacagcaggaaaaaaggggaagttgggtggtgggatgtatttttcatgtctgtgagcctcatctaattccataaaggattcagttcacactaaaatcagaaatgaaaatccagacaagaaaagccaacatcaacattaatcatcattaccagcacttagcatttgtatgcaccagccaaggccttgggaccttatgatatcaactcattaagtcttcccaacaacctgttgtttttcttttcttttttttttctttctttctttctttcttttttttttttttttttttgagatggggtcttgctctgtcgcccaggctggagtgcagtgacacgatcttagctcattgtaacctacatctcctgggctcaagcaatcctcccatctcagccttctgagtagctgggactataggctaatgccaccatgcctacacaaaattattttgtcaataacaaattattgttatttttatctttttgagccagagtctcgctgtgtcgcccaggcaggagtgctgtggcgcgatcttggctcactgcaatctccatctcccaggttcaagtgattctcctgcctcagcctcctgagtagctaggactacaggcacgtgccaccacacccagctaatttttgtatttttagtagaggcggggtttcaccatgttggccaggatggtctcaaactcctgacctcaggtgatccacccgtctcggcctcccaaagtgctgggactacaggcatgagccaccacacccaacctcattttttaaatttttagtagagatgggatcttgctacattgcccagtctgatcttgaactcctgagctcaaagcagtcctctcagatcagcctcccaaagtgcagggattacaggtgtgcaccaccacaacccattttcctatggggatgctgaggcacagaaaggctgagtgacttgccccaggtcatggagctagtcagtgtcagggctgggatttgaacccaggcagcctgcgtagtaactgtatatagtgtctacacttgattgcttgttaaaaaaaaaaaaaaagaacagctgaattcattgccatagtaaagactgacatatgccaggccctggcggcagcctttacccagcaggcctatgaagttagggctgttacatcccaacattttgcatttgggggaaattgagtcccagtgaagcaaactgacttgcccgaggctgaccacacatcagagacagagcgaagggatcacgcccctgtcaaaagcccctccgtgacaacacgtggcattgagataaaatcccaacccatcacaggctccaagcctcctagtgtggaggcccctctccacccccacctcacactggcttctagcaccctcagggcccagtcccttgctcaaatgacctgctcacacagaagtctctactcacccacttctttctagctcacacccagaggcagatttcagttctgcacagttccttctgagctgtggggcctcccaccagtccctactctctccaagactcaatttcctcatctgtgagatgggggtaagaagaatcagtgggaataagaggagataaaaatctgtgtagtacttgggcggggtgcggtggctcacccctgtaatcccagcactttgggaggccgaggcaggcagatcacctgaggtcaggagttcgagaccagcctggccaacgtggtgaaacctcatctgtactaaaaacacaaaaattggccaggcgtggtggcgggcgcctgtaatcccagctactcaggaggctgaggcaggagaactgtttgaacctgggaggcgcgggttgcaggttgcagtgaactgagatcacgccactgcactccagcctgggtgacagagcaagagtctgtctcaaaaaaaaaaaaaaaaaaaaaggctgtgcagtacttgcctcttagccagcacagtggacattggcttttgtatctcactcctgaaattctttcttgaaatttcttgagcaagatcttcctggacttccagactctatggcctctcaccctatggtgtgtccctgccaccccggtaaaaccctcctcactcattgtgaattatttactcctggcgaactccaggaaggcagggaccttttgtggtcagacggtgcctggcacatagtaggttctcaggaaatccttgagttatgagtgcacccaaagccaaaacactgggatgaactagagagtcatgggcctccagctggaaaggagcgaggccaccactcacacccggctctggccagcaccacgccgccaccctgcagaggtatttgggtttttcaacaactcagggaaatgatgaaacaaacaaacaaacaaaaacaaccccaagcttgtatccccacctcgctttttttttcctgggattttcacacttctaaatatatccaacaacttggcaggcacaccaggtgacccagaacatcctttttgtgttgcctgaaatgataggaacaagaataaagaatttaaaagtgagaaacagcagcagagagtgtgactttaaaaatagccagaggggacatttgatgttctctccccactcccatctcccccaacacacatctataaagtgattttcccccctaaaacctcacactttctggaaatcacatttccagagcagttaacagtcattttaaaataagaatccacccctcttcctgccccagctggtgtttcaaactccaagccttggctttcatggggtgatgaggaccccccagctagaggtgccaggcattcc[139 bp omitted]aaaaccccatctctactaaaaatacaaaaattagccgggcgtggtggctggtgcctgtaatcccagctatttgggaggctgaggcatgagaatcgcttgaactcaggaggcagaggttgcagtgagctgagatcgtgccactgcactctagcctgggagacagagcaagactccatctcaaaacaaacttaaaatagaataaaataaaataagaatccgcccccctccccgccccagttggtgtttcaaaccctgagacttggccttggaattcatggggtgatgaggaccccacagccagaggtgccaggcgttccctgccccaaccccagagcaggaggccatcattaaggcaggccagccaggtggcttttcagtgccagccgtagctgaatatattaggcagggagacaggcaagggtttgtatgagacccacagaaggaacagggaatatgctggtctgggttcaagtcccggttttgctggttagccgtgtgcctctgggcaagtttattcctctgaggcttagttttcccatctgtaagatgggcatagaagtggtcactactggctgggcacagtggctcacgcctgtaatcccagcacttggggaggccaaggcaggtggatcacctgaggccagaagtttgagaccagcctggccaacatggtgaaacgctgtttctactaagaacacaaaagttagccaggtgtagtagcatgtgcctgtaatcccagctactcgggaggctgaggcaggaggatcgcttgaacctgggaggcagaggttgcagtgagccgagatcatgccactgcactccagcctgagcaacagagcaagattatgtctcaaaaaaaaaaaaaaaaaccgaagtggtcactatctccgaggatggttgtgggattcagagagccacttggataggatgcatagcatggggccagcccactgacaccccccagtaaacgtagccagtgctattattactgtgctgttgtttaaccctccagaggggaagtctcttgagaggctgtccagggcaatgttaaaagcttggggtttgaagtcactcagacctgatttcgaatcctctctccctgcttctcgtgcatttggtgacgttggggaagccaccccacctctctgagcctcagcttccccgtctggaatttggggatgatcttcgtggctcctggggtgtgcgacgaggccttggttgatggtggggcagaggtagcctagccccaggaacacagtaggtcctcagctggggagagttctacttggaagtcttgcttctccttgtcccaacctgcggggctgtgggaagacccctcagctggtgtgtggcctcaccaggttccttctaagaggatgcaaaagcaagttttcatttgactcggtttcccagaatgtgctctcagagcccaggccaggcaggaggctcttgagaaaaggacaaaaagacatggtggctcacacctgccatcccagcactttgggaggccaaggtgggaggattgcttgaggccaggagtttgagatcagcctggacaatatagcaataccctgtctctacagaaaaaaataaatttaaaaggcgtttttagctcaggctttgctgggttctaacctggctattgtcactcagctttatcctaacataaaaaaataaacaaattagcagggtgtggtggtatgcccctgtggtcctagctacttgggaggttgaggcgggaggatcgtttgagcccaggaggttgaggctgcaatgagctatgatcgtgccactgcactccagcctgggtggtggagcgagaccctgtctcaaaaaagaaaaaaaaaagtggcagggagaaggaaaggaaaggacaaagaggttcacagctgatctctccctgaacctgctccttccgtccccatctctgtcagccccatcttttcaggctcaggccaaacccctcggttaccctcccagttcctccagtcacccatgaatcagatcttgcaggaaaccctgtcagctgcacctacagaacctctccaaaatctgaactcttctccccgtccactgcccccaccctgctccagcccccttcccctcccctctggacatcccagagcctcctccctggcctccctgctcccatccctgccccccaatcatatcccacaaaggggatatgactcactcacttaaccggcaattctggagggtcttaaaacctggctgcctcaagaggctttaaaatgttatcagatgggggccaggtacagtggctcatgctggttccccacttgcagccagagggagctggtgaccacctgagtcaggtcagggccctcccctggctgcacctcacaccaggtgccagcaaagccctgatgttgctctatttctagctcccacctgatctgcccctccctggctcactctgctctggcctcccactgttcctggagcactccccccagtcccccacaccagccttgggatctttgcatctgcaagtccctctgtctccgtgctgatctcacacacctcctgacactttctcacctcctgcaggtctttgttcttgcaccaccttcccagggacgctctccttgcagcgactgaaaagtgcaacctcaccccaccctccatgccggcactcccctccctcggtggcattttatttttctctgtggccccttcctatcttgtgacacataatatatcctacttatttgtccctttcttgatttgtctcacctactgagctttgagttccacaggggtcggggtttttgtctgatttgttcattgcagtggtgatttgttcactgcctaaaatagagcctggcaggtacaaagtgtttggtaaatagaaatcaataccccagggtctgtgacctgacttaggtgttaacaggttcctctgaggtgtgtggggaacagactgaggggtttcaggggacatctgttctcaccacaaattgccccccaaccagccccagacatgaacagtctcccgggagctccctctagccttctcgtatatcccagccctgcctcatgtcacaatttgtaatgatgtgtttggctgggtgacattttatggccatctgtctccctatcccctataatgtggtttgccgaaagcaaagcccaggactgtctcggccatctgtgtctccaggatcacccctcactgggcatggagtatgtgtccagttaacgcttgctgagtgaatgaatgaatactccatcctctgcctggagaattacgcactttagcatatccaaggctctgacaagtcctgcataaaagagcattattgttttctttctttctttccttctttccctcttcttttctttctgactataggatattgattatcaatctggcaatagtcaagattggcagtctggtgtattagtcaaaggttttcagcctacaaaagacaaaaagaaaaaataaactggctaaaaacaaaaggggatatgatttactaactcacttaaccgacagtcacagaggttcttcaaacctggctgtatcaaggggctttaaaatgttatcagatgggggccaggtgcagtagctcacgcctgtcatccagcactttgggaggccaagacaggcagatcacttgaggtcaggagttcgagaccagcctggccaacatggtgaaaccccgtgtctactaaaaatacaaaaaattagccaagtgtggtggcatgtgtctgtagctccagctactcgggaggctgaggcaggacaatggcttgaatccgggaggcggaggttacagtgacccaaggttgcaccagtgcattccagcctgggtgacagagcgagactctgtctcaaaaaaaaaaaaaaagttatcagatgggaaatgaattccgatattaaaaattgatatgtatttatactatattattaaagttatttttcataaaacatagaagggtaagtttaagaaatgagaagtatttataccaaaatgattaaatattatttaatttaaagatataaatgtcttgttggacaaataattcaaaatttccattagacaggaaaaataagttcaagagatatattgaacaacatggtgattatagttaataacaatatattatatacttgaacattgctaaaagatattttaagtgttctcaccacacacaaagggtagtgcatgtgttaattagcttgatttagccgttccacaacgtatacatatttcacatcatcttgtacaccatcaatgtatataattttgtcaattaaaataaatacatattttaaggccgggtgcagtggctcacacctataatcgcagcactttgggaggccgaggcaggcagatcacctgaggtcaggagtttgagactagcctggccaacatggtgaaaccccatctctacttaaaatacaaaaaaattagctgggcatggtggtgcatgtctgtaatcccagccactcgggaggctgaggcagaagaatcgcttgaacccgggaggcagaggttgcagtgagctgagattgcaccactgcacaccagcctggacaacagagtgagactccgtctcaaaaaaataaataaataaaaataaaataaatacatatatatttttgagatggagtctcactctgtcgcccaaactggagtgcagtggcacgatcttggctcactgcaacctctgctgcccaggttcaagcaattctcctgcctcagcctcccgagtagctgggattacaggcacctgccatcatgcctggctaatttttgtagttttcatagagacgaggtttcatcatcttggccaggctggtcttgaactcctgaccttgtgatccacccatctcggcctcccaaataaatacatattttaaaagatagaaatcactctggaaggagagttaatctgtttgatataataataataatatattaatattatattataacaatatattagtattatattctaataatatattaatattatattataataatatattattatattataacaatatattaatattatattataacaatatattaatattatattatgtaataataatactactccatatagctatggaaaagttcatatgaagaaaccaggctatgatctacaaactggcaacaaatttgttcttctattttccatatgctgtctgtgtacgtataaagtgagaggtctttttatatgagttaagggtgtgaccaaagacaaatggaaaaagacaaatgacaaacatactaataaagagcttcggtttctccacaaaaaatacaataataaaataaaatgttatcagaaatctcttgactctcctccacgttagctcactttttccctcaagagggtgaacatgacccttaacagatccagcctcaagtgctggattctcttgggaacttggttaaatggttttttttcttcccgaatgtccaagtcaccttccagacctgcagctcctgagcagccaacttaggacttctaatggagagtgaagttcccctggttcgcggaggggccggccacagcctcaaggctgctgttgattggtccgacctgagtccttgagtctggcagagtgccatggtgctctgtaatcccacctgtaatcccagcattttaggaggcagaggcaggaagattgcttgagcctaggagttcaagaccagcctgggcaacatagcaagacccgtctctacaaaacaaaacaaaacaaaacaaacaaacaaaaaaattagtcaggtgtggtggtgcacgcctgtggtcctagctactcaggaggttgaggtaggaggatttcttgagtctgggaggtcaaggctacagtgagccaagatcacaccactacactccagcctgggcaacagagcgagaccctgtctttaaaaaaaaaaagtccttgagtcatgattccagatgcaatcgcagatgtgggggctgcaaccctccgatgggctggggttcacgtctacaccacatggctggagcacaggccaggaggggctccggctggggaagcatgtggggagcctggctgtgggacccaggcggccccgggccctgtcgccctgcagtgcaggtcagctctgcggacgctcggctcatggtctttgacaagacggaagggacgtggcggctgctgtgctcctcgcgctccaacgccagggtagccggactcagctgcgaggagatgggcttcctcaggtactgggggccctcggaggggtgggagccgggaggggctggggagcaggcctaacccctgccccgcccagggcactgacccactccgagctggacgtgcgaacggcgggcgccaatggcacgtcgggcttcttctgtgtggacgaggggaggctgccccacacccagaggctgctggaggtcatctccgtgtggtgaggagggcagcgggcaggtggggcaacacctcagacccccaaggcactccctctccccgttttccttccacctgtcttaactggtctctatttcctttctttctgtgtctccaatcccatctctcccagtgattgccccagaggccgtttcttggccgccatctgccaaggtgagatcctaaaactcagaaccctctcctttaggcccttggggaggccacgtcccctcaagctccccaggatggggccatgtactttcagaccccctagggcagggccaagcctgggctctggggacctgggctccagtcccctgtcgccgccccctgctgacccttgtcccacagactgtggccgcaggaagctgcccgtggaccgcatcgtgggaggccgggacaccagcttgggccggtggccgtggcaagtcagccttcgctatgatggagcacacctctgtgggggatccctgctctccggggactgggtgctgacagccgcccactgcttcccggagtgagtgccccccaatggcgctgatgatggggaggcagaggagcggagagacagtggggaggagggcggattgtgcccaggcaggtggccaccctccacccctttccctggtaggcggaaccgggtcctgtcccgatggcgagtgtttgccggtgccgtggcccaggcctctccccacggtctgcagctgggggtgcaggctgtggtctaccacgggggctatcttccctttcgggaccccaacagcgaggagaacagcaacgatattgccctggtccacctctccagtcccctgcccctcacaggtaagtctaagggctgagccatggggcttgaggacccgaggccaggaggacagaggaggggaccaggggcacaaggcaatcaacttatggctcaggcatccttggcaataaggggaatgatctcgagggagcacaaagtgggccttaactatcaatgatcagtgcagccaatttggaaaatttgccagcatttccccaagaagtatacataaagttaccattggacccaacacttccactcccaggacaggaggtatatacctaagacaaatggaaactgtgtctgcaccaaaactcgtacatcagtgttcatagcagcattattcataatagcccaaagatggaaacagcccaagactgtttcatcggacaaatgcataaagaaaatgtggtatattgaccgggcgcggtggctcatgcctgtaatcccagcactttgggaggccgaggtgggtggatcacgaggtcaggagtttgaaaccagcctggccaacatggtgaaactccatctctactaaaaatacaaaaattagcctggccaacatggtgaaactccatctctactaaaaatacaaaaattagcctggccaacatggtgaaactccatctctactaaaaatacaaaaattagcctggcgtggtggcacacgcctgtaatcccagctactcgggaggatgaggcaggagaatctcttgaacccgggaggtggagattgcagtgagccgagatcacaccactgcactccagcctggctgacagagcaaggctctgtcatcttgaaaataaataaataaataacaaaaaaaatgtggtatatccacacaacgggagaatattggaccatagaaatgaatgaggtactgattcatgctaccacaaggatgaaacttgagaacagtgctgaatgagacaagccagccgcaaaggccacatactgtaggatgccacttgtatgaaatgtacaaggctgggcacggtggctcacgcctgtaatcctggcactctgggcagctgagatgggaggattgtttgtgctcaggagtttaagaccagcctgggcaacatagcaagaccccatcacttaaaaaaatgagctaggtgtggtgacggatacctgtagttccagttactcaggaggctaaggcaggaggatcacttgagcccaggagtttgaggctgcagtgggctaggattgtgccactgtactccagcctgggtaacagagcaaaaccttgtctgttaaaaaaagaagaaagaaagaaagagaaagaaaagaaaggaaggaaggaagaaaagaagaaaagaaaaggaaagaaagaaaagaaatgtctagaataggcacatcggtagagatagaaagttgattgatggtggcagggtgggaggtggggatgggagattgggaggtgactggtgaaggacacaaggtttcttgtctgggtgatgaaagattctaagtcgatcatgatcatggttgcacttgtctgtgactacacaaaaagccagtgacttgtgcctttaaaaggaattgtctaatatgtgaatagtagttcaatcaagctgttaccaaaaaactaataaaatgaaaagaaaatgtgttaaaaatgaatgaatcagacttagaaagtaagttaggagtcattccctctgcaattccctggagtattcccttggtcttactgagactcacttaggtgccaacatgtccttaacacctctccaacacatacatcttccttttggattaaaagcaggccctgggcttcagatttcagcaggctgcagtgtaataataataataaaaataggctgggcatgtaatcccaggccaaggtgggggtatcgcttgagctcaggagttcaagactcgcctgggcaacatggcaaaaccccatctctacaaacaaaaaaaattagctggctgtggtggtgcgcgcctgtggtcccagctacttgggaggcggaggcaggagaatcacctgatcacccaggagatcaaggctgcagtgagccatgatcacaccactgcattccagcctggttgatagagcgagaccctgtctcagaacataataataataacggtgataatgatgatcatgaagtagtaatagcgagtagtattcgagttcatgattgagtattcgagtatagcgagttcatgatcatgaagtagtaaaagggaataagggagtacatgatgagtgtacacaacacagtaaaataatctggtaaacatagcagtgtgccaggcaccattccaaatatgtcctgtgtatggactcacttagttctcacagcaaccccagcacaccctggtaaggagggttctcttaagatcctgttttccacccaggaaaaggtcccaacccaaagaaggcaaacaatgccccaaattcgtacagctggtgaacggcaaagatttgtgcccaggtggactggcactggaatctgtgcttgtggcccccacgctgtggtgacggagaatccagggccatgttggggttggcattatgtttatttttatgtttattttatttttcatgatctgtggtactggtttcccat[131 bp omitted]ggccaacgtggtgaaaccccatctctactaaaaacacaaaaattagccaggtgtagtggcaggcacctgtagtctcagctactctggaggcagaggcaggagaatcacttgaacccaggaggtggaggttgcagtgagccaagatcgttgccacacccttctccttagtgaaaagagtgagagagttaatattgaagtaaggacgcatctttgaggacaggtggacaggtggaagcggctgggatttcagacacagggctgagggggtcacagcatgggctttggggtcagattcagatatttgccaactgtgtgatcttggacacatggcttcacctcaccgtgcctcagtttcccttatctgtaaaatgacttcctagggttattgagacaattaaaagggttaatatgagtaaagagcttagagaactgccagcacatagtgaacactggtaaatgttagcaattgctactattgttgtttaatacttttactagttatatgaacacttgctgtttgcctggcatgcaactcaatgactcaccaatttctcactacaacttctggggataagtgattattatttccattctacatctgagagctctaagactcaggcaggtgatgtcatcagcaggcagcaggcagcaggcaacaggcagggctgccaggaacccttgcataggttgtgcactgcacaaggacaccacatctcagggttaccactctctctgtagacctgtgtatttattattatgattttctgctaggtggaagtcaaatgtctcaagataggagtgtctctctctctctctctctctttcttctctctctctctttctttttttgagacagagtcttgctctgtcacccaggctggagtgcaatggcgcaatctcggctccctgcaaactctgcctcctaggttcaagcgattctcctgcctcagcctcctgagtagctgggattacaggcacctgccatctgtaatcccagtgctttgggaggctgaggcaggaggattgcttgagcccaggaggtcgaggctgcagtgagccatgttcctgccactgcactctggcctgggtgacactgcaggcttagaaatgaaaacaagctgtgttaaaacatacatgttatgaaactttggacacgtgacttggcctcattttccccctctctaaaatgggataatatagaccctacctctctgggctgatgaaacattaaagaaaatggtgcaggaaggcgcctagtatgcgatgagctcttggtacgtggcgacttccgttgtggcttttttgtttgtttgtttgtttttgagacagagtcttgctctgtcgcccaggctggagtgcaatgacatgatctcggctcactgcaacctccacctcctgggttcaagtgattcttctgcctcagtctcccgagtagctgggattacaggtgcgtgccaccatgcccggctaatttttgtatttttagtagagatgaggtttcgccacgttggccaggctggtctcaaactcctgacatcaagtgatcctcctgcctcggcctcccaaagtgctgggattacaggcatgagccactgtgcccagcctattgtggttttttttttaaagaacagagagggcagggtgtgttaggggccatggtagcagctggacagaggtttgtaccaggtggggcaggccagcgggggctggaccagcattgtctctctcacagaatacatccagcctgtgtgcctcccagctgccggccaggccctggtggatggcaagatctgtaccgtgacgggctggggcaacacgcagtactatggtgagtcctgtcctctgcctctgatgccaccgtttgggagactctgaactaggctggggatgggcagtctggctggttggatgagtcttgaccatgaggagtagggacgctgaggggaatggggtgggcaccaggagggaaggggggtgtgtacaccccccagctctggccagccttgcctgcacacccccaggccaacaggccggggtactccaggaggctcgagtccccataatcagcaatgatgtctgcaatggcgctgacttctatggaaaccagatcaagcccaagatgttctgtgctggctaccccgagggtggcattgatgcctgccaggtgagggactctgtaggggcagccccctggtcgctgccaccccagggatggagatgcaggggagtgggtggtcaggctccccatctaaaagcctgagggctctggggccacagcccatgtcatcccggggtgggcctcctgtccaaccactttggccttcagccagacctccctctcccctcccagggcgacagcggtggtccctttgtgtgtgaggacagcatctctcggacgccacgttggcggctgtgtggcattgtgagttggggcactggctgtgccctggcccagaagccaggcgtctacaccaaagtcagtgacttccgggagtggatcttccaggccataaaggtgaaagttgggtccagatgggagccagggtggggacgtttgggtgtctaatgggggaagggaggcagagatttgttttaggaaacctacgctcaggcctagaagagggccccccttgggaacagatggactttgaagggttcctggggaagggaagccagtggtgggacgtggaagcctctcagacctcgggagcccccagctgtctttccccagactcactccgaagccagcggcatggtgacccagctctgaccggtggcttctcgctgcgcagcctccagggcccgaggtgatcccggtggtgggatccacgctgggcctaggatgggacgtttttcttcttgggcccggtccacaggtccaaggacaccctccctccagggtcctctcttccacagtggcgggcccactcagccccgagaccacccaacctcaccctcctgacccccatgtaaatattgttctgctgtctgggactcctgtctaggtgcccctgatgacgggatgctctttaaataataaagatggttttgattaatgtggcctccgagcttacaaatgtacacagcaatgaggacattttgtcaggaaggaagagaagaattaggacctggcgcaaatcagacagagagtgtgggtccctcagttcccactgatttgagatttaagattttaattggttcacttaactggaattttcctggagcaaattggcttcaggtacagctggatccagctgctctctcaaatctgccttaggctgtgttagcttcatttccaagcagcctctcctacaaccagagagagagatgtccccttccacacaaactctttcccaatcactgcagaaaaagtcccaggcaacaacaacaaaaacccaggcccagctcccattgtacagatttgggtcacgtgctcatcccttggcaaatcactgtgcaccggatgtacgcggtaggggtggagcggggtggagtgggaggcgctaggccttcaagaatcgtgtgacctgagtgtgggagtcccaaaggaaatagggtgctatttccagaagtggaaatagatgctcagtgagcaaaaaagacatctaccttgaaccaacacggaaaacggggccctgtaaggtggagatagggagacgctgggaacacagcctgagaccctcccccaacccctttctccatctgggcagcttctggggaggaacccccttctgtagagcctctgcagagcctcatgcagccccgatggccaccagggggcactgctgccccaacattgtgacacattaaggggtttcctgcctggagtcagccgcatgttgctgaaaacctgctgttctgctgaagaaaggctcagcgggggagcctgttcaccatgactttaaataataacaattatcatacatcacccatggaccacagcttccaagcaatttcctttttttttttttttttttttttgagacagagtttcactcttgtctcccaggttggagtgcagtggcgtgatcttagctcactgcaacctccgcctcctgggttcaagcgattctcctgcctcggcctcccgagtagctgggattacaggcgtgccccaccacgcccagctgatttttgtatttttagtagagacgggctgtcaccatgttggccaggctgctctcgaactcctgacctcaggtgatccacctgcctcggcctcccaaagtgctgggtgtcacgcgcatccatgtgaagagaccaccaaacaggctttgtgtgagcaataaagctttctaatcacctgggtgcaggcaggctgagtccgaaaagagagtcagtgaagggagataggggtggggccgttttatgggatttggataggtagtggaaaattacagtcaaaggggtttgttctctggcgggcaggggtgggggtcacaaggtgctcagtgggggagcttctgagccaggagaaggaatttcacaaggtaatgtcatcagttaaggcaggaaccggccattttcacttcttttgtgattcttcagttacttcaggccatctggatgtatacatgcaggcttgggctcagaggcctgacactgggattacagatgtctgctgccacacctggctaatttttgtatttttagtagagacgggtttcaccatgttggcaggctggtctcgaactcctgacctcaggtgatccgcccaccttggcctcccaaagtgctgggattacaagcctaagccactgcacccagcccagcttcctaaaatatagatgatctacaagagctcctttgagaaactgacaaactgtgcatttggaaaacgatcccagcgtcactccccgatccccacacccctggcgaggttgagccccaccactgctttgttggtcaggagcccccaggcccacatcgtgttagcagagcctcagtgcagtttccccaaacgtctacctctggctgtggtgttctacccatggcatgtgggatgtaatttgagacctgacctacggcttgctttgttagaaacgtattgagttacaacacggagtgactgagttttcctttgtaattgccagctgagaaatgtactgtacctgtgttttaggaagtctggggactctgagagaacatggtccaccctgggggttctaaactgaggtgaccatgtcctggagggacacagtttgctctggtgaggagaagggcgggtgtgaggggcactgaagaaggcatggccctgccctgggaagtctgggggggatgtggccttattctaggggatctgatggaaatttggtcattaaaagccaacaggcatcctgctgggaaaataaaaaccaggtggccatgttattggaaaggggtcctgatccagaccccaggggttcttggatctcgtgcaagaaagaattcatggcaagtccacagagtaaagtgaaagcaagttgattaagaaagtaaaggaataaaagaatggctactccatagacagagcagccccgagggttgctggttgcccattgttatggttatttcttgatttagtcttgatttattatttagttatgctaaacaaggggtggattattgacgcctcccctttttagaccatataggataacttcccaacattgccacggcatttgtaaattgtcatagcgctggtgggggtgtagcagtgaggacaatcagaggtcactttcatggccatcttggttttggtgggttttcccgacttctttactgcagtctgttttatcagaaaggtctttatgacctgtatcttgtgccgacctcctctctcatcctctgacttagaatgccttaatttaccgggaatgcgggccagcaggtctccgccttactttacccaggtcctatttaagatggagttgctctggttcaaacgcctctgacagccattctgagttctgtctgcactgttgctttgttggaggagtggaggggctggggagattgtgattcactcaacagccattcactggtttcccttgtatgccaggggtcagtgagcctcagtttctcctcctgctcccagcaaccttgccactcaccccaaagagctaggaagatatttaaaaagaataataacagtcacaaggttgctttcagttcctgccagggtctcagtcttcagaaaagctgaatatgaaaattacttccatgtcattgtggtgccgctcagaatcagaaatatttgacccatcttacagaattagtgcaactacatcaggaacccaagccaagttttgcattcctatttagcatttatatctacatagtccttttcaaatatagaaaagctttctggatgttagttggaacagatagctccatatgtggttataagttggcattctcccagctgggttgaaggagaaatgtacagctactctgccacaacagttatttcatacataaaatcacagccatgattagcaatgatggtgaaggctattcattttatattcagaaataattattgtgaacattcagatagcagcataagtagggagatggactttagtttctgcataaaaagtaacactgtttcaatcctgcagttatgaagcgaggagctgttttggctcttgctgcatgacataccacccaaagctagtgggtacagtaaatgctcatggattctgcagctcagaaagttggacagggaacagcaggcacagcttgtctctgctccctgatgaccaggtccttagctagaaagcctaaaggaacagggactggaatagggaggcttcttttgtttgtttgttttgaaacagggtcccactctgtcgcccaggctggagtgcagtggtgtgatcatggctcactaaaacttctaccacctgggctcaatcgatcctcccaacttagcttcccaagtaactgggactacgggtgtgtgccaccatacccaactaattttattttttttttgtagagatgggactggttgcccaggctggtcttgaactcctgggctcaagtgaccctcctgcctcggtatcccaaaaggaggctctttactcacaagtctagtatccgggctgggatcactcaaaagctgagctcagctggtactgtggactcattgtctggctaacttgggcttccttccaatatggctacccaaggacatttgaacttctcacgtggtggctcatggctccagagtgagcattccagcagacactggcctttacaccccagcctcatttctgctccactctgtcagctgaagcaatcacaaacctgtccagaccctagaggaggagatggagaccccaccctttggtggtggaaggcaggtcaaaaaatttggggccacatcttaaaactgccctaggagcttatggactatcggagcaaattaacagctgacaaagcagagaaatgatccctcagtaaggtgttcaacctgaaatatttccctgctaaaattgtggataataaaattatgacagtaataactttttagaacactttcacatttgttcttacattacagaagttcattctaagaaggtgatagtcagctttgggcaaatctttaatttaatacttcactaattagcatttggccacaatgcctgtttcacttctaaataataataataatttatattaataaacatatccatgcatatttttgagcacttcctatgtgacaggtactgtactgagagttttatacatgttacttcagtatttccccaaattcagatgtttgaaagtggctgtcttaatttttgctattcattcattcaaataatatttattaagcacctattatgtgccagacactgttctaggaattggagaaatataggggacaggacaaaccaactttatggagcttaggggcaaacaaataccgctggtactacttgtattgttttattcaaattatctcttttccttttgtgtgtgtgtgtgtgtgtcttttttttttaagcttagccttgactttatttatgtattatttttattgatttatttattttgagaccgggttatgagactggctaatttttgtatttttgatagtgatggggtctcgctatgctgcccaggctggtctcagactcctgggctcaagcgatccacctgccttggcctcccaaagtgctaggattacaggcatgagccactgtgccctgccagccttgactttaacaataatgtttatgaaactgtgggtttgaggccgggtgcagtggctcatacctgcaatcccagcactttgggaggccgaggcgggtggatcacgaggtcaggagattgagaccatcctggctaacacggtgaaaccccatctctactaaaaatacaaaaaaattagccaggcatggtggcgggtgcctgtagtcccagctactcaggaggctgagacaggagaatggcgtgaagccgggaggtggagcttgcagtgagccgagtttgcgccactgtactccagcctgggcgacagagcgagactctgtctcaaaaaaaaaaaaaaaaaaaaaaagaaactgtgggtttgatgtggcggtggcagatatatgtttttcaatataaatcaaaacaaatgtattaaataaacaaatgctagtgaaataataacaattccttcttcactgccatcctatactctcccggggtttcccgccagcagcccatgtgccgccctttgggaaacacttgtttcatcgccatgcaagctgggaaggagggtctgtggggtttgctgtcctacagaggggctgcatatcccgtccaaggtccacctccgaggggcagggctggcgctggggcctggggctggaacagctcgggatatggcactgagctctcattcccagcctctctctgctgagcaggttcggacactttctccctggcggggtggtgggggggtccctggaccgctagggaagtgcatgtgtccagatgctggcggtgttctggagaaaaagatgggatgccttaacccagacactccttggactggtggtgcaaaaaggagccttcgaatgaggactgggcccaggtgtggcaggccaggtctcactaacgcaggcctccataacaactgtttcagcaccgactgagtggctaagtcaaatattaaaagctgatagagccagtgccctatacaaaagctggaatgtaacaaaagcctaccaagagttttgctcaggcctttcctgggctttaaagcatgacaagataaagaatgaattcttaacaggacccttttaggattaaacaagtttaattgggggtctgaagaaactacacttacacacaggcatatagcttagaaggtatataagctctggaaaactttgtaattttgagttggtctggggacaatttccaggctttcaccctataaccagttacagaaataaaaactcccttttcgctgggtgcggtggctcatgcctgtaatcccagcactttgggaggccgaggtaggcggatcacctgaggtcaggaattcgagacaagcctgaccaacatggagaaaccccgtctctactaataatacaaaaattagccaggcatggtggtgggtgttggtaatcccaactacttgggaggctgaggcaggagaattgcttgaacccgggaggcagaggttgccgtgagccgagacagtgccattgcactccagcctgggcgatagggcgagactccgtctcaaaaaacaaaaacaaaaacaaaaacaaaaacaaaaaaaacctccctgttctcccagtttatctgcatctcatcactgggccatgagaaatagcagcctaatcctcagtttggtccaggaacacaggtgaccctctgtcccatgtggtttgaccaggtaaagggctgtctggggtttgagggtctggagcacccctttgggacactgctttgaagatggagtccccagtgcctaactctgagcctcctccaccagggtggtccgtgaatctcacaggtgcacagtaacgagcccccttgcctgtatgctcctcctccccgtctccccgttcacgtctccaggcgaatctccccttctgggtccagtaacactcctaaatgcctgaccttgactatccaccatggcagccccagccatgccctgcagatgcccacccctgggcccccggggctggccagcagcccacgagtctccccagccacacatcttggccctgcttgatgcacatgcactccgttcctggatgctgtgtgctcatctctaacctgctccaagagaaccagcagggccccatgggaagaggctccctgcatgttcagctgtctgtcagcagcggcccttcaccaagcagtggctcaactttcccactgtggatcgcttgacttgtgcccagccctgctaatgggtggggggttcctccagggtctggcaacccggccccctgggaaagccctggaagatttccatcccctctttcctcccttgccctgcccaccaaccccagacctggcccagcctcaggcagaccggatgggaaccaggatccctgggagacccccaggccccctggaccctcgaacaatggaaggtgagctccagctgccccgtccccaccctggccccacctctgccctggtataagcccgcctggcccgcagcacctgcagccaccatggggatactgtggcttctgctggtgggtgagtaggagtggggactctggaagggggtcgactgtgccacgtgggccccagcccttagctgacatccttcccctcagtcctacagaaccaagtgacttggagcaaggagatcagaggtgagaatggatgtgctccctaacctggagagaggacagggccatgtggacaggcagggagggctccaggggtctgaggagccatggccccaccctggagtccctcaggggacctggagctttctcttggggactgaggggacacagccctgccctggggctctgaggggagcctcagtggtctcgtgtccccagcctcgctcctgtacccctatgggctggagtgtggggatcaggccctccctgcagaggatgatgacttctctgaggagctgcggctgctggagcccttcatgctctttgaagccacacacgggacggcctatgtgagtgccctggccctgaccgtgcggtccctgggctctctctcttctccccaccccactcttgactcggagcctgtctatatctatagctcctggctccttctggcttcgtcctctgtcttcctggggcgggccctgtccctcttctgtcccctgccctgccaacacccccctgcgggtcttgcccttcctcacttcccccagttctgcaccaatgggctggtgtccttcggggagcctgtggctctcttcacactggaggcatttccccaggagatgggccaggccttcgcagtcccgttctgggccaatgggtccacactgagcaggggccagatgtggtaccggcagagccgccagccagagctgccgcagcaggtggcctgagacctggcctcagccttcccccatgccccgcccaccccttgcgccctgctggtggccatgtgggaccaaattccattttacggggcacttggtccccaggtgaggaagcgggtggcagagaagggcccaggctgaggctgtttggcccaaccccttgggaagaagggcttggattcctgggtaaggaggagacaccacggaggagagacggagatgggggaacgagggagagatagagggggcgggaagagagagacagagagacggaagcatggagatgcagcgaggtagagaaaatgggtgagaaagagggaagacacgaacagggagagaaatggcgagagagaggaggcaagacagcaagcgagaggagtgagatgatcagatggagagacagagaataggaaaaggagagagacggagagagagaggggatgagagcagagcagaaaaatcgagactgggggatgtgaaaggaaggctggcacaggtgccagcagaggcagctgtggacatggtgtggacaggggcctgggaggtggcgtggatgggggtctgggatgtggcatgggtaggggcccgggatgtggtgtggatgggggcccaggaggtggcacagctggaagcagccagcttagtggtgcagatggagctcggttgaggactgggcagtgaggagggtcctgggtgcccctggaccagcccacgacaccctggctcctggcgcttgccctgcaggtgaacaccttccaggaggtgctggccctgggcagcggcccctcctgggtgctgtttcaccacaaggacatccagtggaccatgggggtggccagcggtgggagcccccaccacggcctggggggcattgcggcccaggtgagtggggaacccacaggggcctccctgggtccttggggagggtgaggacgcaggtgggctgaccctgttccaaatgacacccccaggcaggcttcaacagcggccgacagagggactacttcacccttcctggctcccggacctcaggcatcctgaatgtggcagacaccagcaatgtgggcatccccaggcactaggccttctgcatcaacagctttgcagtccccaacggctgcacctacaatggtgaagggtggagaacctgccccagacctgcctgctcccagggcccagccacagagcccaggagcccaggccccacactctcctcctccaagacccaggagtccagtcagccctcagtccattccatccttagatccaggaatcagaggccgggcggggtggctcatgcctgtaatcccagcactttgggaagccgaggcaggcggattacctgaggttgagggttcgaggcttgaccaacatggagaaaccccgtctctgttaaaaatacaaaattggccgggcatggtggcacatgcctataatcttagctacttgggagactgaggcaggagaattgcttgaacccaggaggcggaggttgcagtgagccaagatcgcgccattgcactctagcctgggcaacaagagcgaaactctgtctcaaattaaaaaaaaaaaaaaagatccaggagtcagaacccccagtccccaccttcctcaggacctgaggttcaagcctcagccccagacacccccaccgcagcccactctctccacagcccagttcctgcccctaggtgcctctttgtggaacagcagtgcctgcagccaccacactgtgggcaggaaggccgggtgtggtgctggccagagggctgccaggtggggcagcagtgtatgcctgcacaccccttcccacactgctgggcccctcgtggcccctcctgccacctgggtccccagggccacccgcacacactctccagatggcagctgtggctccagccctgccacttcgtcctggccctgcttcctggcatctgcgtggaggtggagttgaggaggggaggcccggtggcagaggccctggtgcggctggtcatccatggctgggatgtggtagtgagatcgcatggcccaatagaacacatcctggtgagtggggctgggagccgggctggaggatagaacccggacagccgtggagtcgcagacacactaagtgcccacagccccagagactgccacagagactggcgggcagagtcaaatgttagatggacaggcaggcagacagacagacaaaatgaataacaggcagagagacggacaagaagacagaccagctggccaatggacaggaagacaggagggttggacaggtggacaggttgatggaaagacagacagagtgacgttgggatgaccagagcaggtggcaagacagacggcagaagggggctagatggacagaaggacacatggcgagcagatggcgaagcacttggtggactcgctgaggccgacgatggtcgcaggcagacagagcctcccgggctctcatcctagccatggacctcacattgcccaccgatgcagccctccggggcctcagcgccacctgtccccttgaccccacctttctctgttatacaacccagtttctgccgcccaccctctggtttcctgactggttgacctcactggccgccccatctgctgagcctactgagcctacggtgcttccccacttcttaccttctgggacatcaggctccctctcaaatccctgcttgtctacactcatacctcctgcgctccttcctccaataccccacaggtgaaccacacctctccacttgcactcacccctgcatgtaggcagcagagcacacctgggctggtgtcgtacctgtgactgtgaacttgaaaggaccttccttccacctccctggcaccctcactcacctcctctccctggccacctgttcacacctactcctctccctttagaccaaacctcctccctggaactcattctcagcctatgagatcgcttcctacttcactggtagcatcagctggaacctgccaggcactccccaaccctccacctacagtccaggctgccatgatggagggtggtctgtgctccttcctggcttggccacctctgtgacagttcctgcatctcccagcaatgcttcctctccctctcctctatatccgtgcttctcaaagtgcagctattagaccagtagcatcagtagcacctaggaatgtgtttgaaatgcaaattcttgggtcccacccaagaccaccactctgggtgggtacatgcaatctgaattttttttttttttttttttttgagacagggtctccgtcactcaggctggaatgcagtggcacgattttggctcagtgcaaccgcctgccttggcttcccaggataatgggattacagggagtgcaggccagcactcctggcttgcagtctgtttttgctagcccttccggggattctgatgcatgctgagctccaatgagcttcaccatcaatttgctatttttttttttctttttgagacagagtctcgctctgctgaagtgcagtggtgcaatcttggttcgctgcaacctccgcctcctgggttcaagcggttctcctgcttcggcctcccaagtagctgggattacaggtgtgtgccaccacgcccggataatttttgtatttttagtagagatggggtttcaccatgttggccaggctggtctcaaactcctgacttcaagtgatctgcccacctcggcctcccaaagtgttgggattacagatgtgagaacctgcgcctggccaatttgcctttttctaccagatccttctcactgcattccaataggctacaattttgccatcttcaaaaacctttctcctcaatccttcctccgcctctagccactacctcatttctcacataccctgtacaagaaaagcacacagaagagttgtcaggctcactgcctccaatgcctctcttctttctttgagagacagggtctcattccatggcccaggatggaatgcagtagtgcagtcatggctcactgcagccttgacctccaaggctcaattgatcctcccacctcagccttctgagtagctgggaccacaggcgcacatcaccacggctggctatcagttcctctcttttcattctctctttcggaccttctctagtcaggctttttccgccttcaacttcatgcagccaaaactactctcgatgaggtccccccaggacagtagtcaatcttcaggccacatcctgattgaccgccagttatgtctgacacagccctgtccctcccttctccatgagacactcttcccaatttccaagaccccacattctcccggttctcctccagccatgcgtccccatcagcccacacgctaaacactggagtgcccagggctcagcctgccctcctctcctccccaccttcacccattcctgggcactcacccaggctttctgatggaaacacaccaatcttctcctacttttcctcttaagaattttacctgaccgggtgcggtggctcatgtctgtaatcccagtgctttgggaggctgaggtgggaggatcgcttgagtctaggagttccagaccagcctgggcaacgtagtgagaacccatttctacaaaaattttaaaatttgccaggtgtggtggcccgtacctgtagtcccagctatgtttcagagcctcatggcatcttctccttcttgctgacaagtgcatttctatctgaatgcctctcgctgggaacctgcgccatcacactcaccccatgccaaggccccgaccccacagcagggccacattctgcacctgggaccgcaggagctgagccccaactgccgtgagctgtgtgagtgcaaggaggctgggcagccaccccactgcagcccccaggcgtgtgaggacggggaggcctgcttcctgctcaccggggcctggtactgtggggtccggagaggtagcagctgggtgtcaggtgacccccattaccacagcttcaacagcacagccctcacagcccagggtgcctgtcactatgtgctgagccgcacctgtcaggccggcctgagggcacaagctttcacagtgtgggtggacaatgagtacctaagtcccacggccctcatgactggggctcggccgatcgaagtggacgtgcacggggtgaaggtgatgatggaggctcagacccccgggagggcacaggtgagcttgggcaggggctgggatcaggccccagaagggcgggcttagactcaggaatccggggaggacccattcacatcctaggaagacttgaggggacacagcctcaccccaaaggttctcagggattcccagacccacctaggggtgtttgatgtggacatggccccgggtgtgtctccaggttaacaggacccaggcccacctgcccctacgcctggctggcggccaagtgcacgtctatttcagcgattctggggccatgctggagactgacgctggcctcttggtctcctacgactggagccaccatgtatccattatggtgcctgagtcctacgctggcaccctctgcagcctgtgtggggacttcaacggggacccccatgatgacttccatgcccctgatggctccctcctgcctgacccggaggtgtttgcactcagcttgaagggcctggattccccagccagttgctccaccgtgggcactgcccctctgtgcccccatgaccgagagggccggtaccagtcactggctttctgtgggctgctgggtgcccacgatgggcccttccaggcctgtgatgagctggcccaggcccaagtccacatggagaactgcatccgtgacctctgtgccacaaggggttcccggcagatcctgtgcgaggctctggggagctatgtccagcagtgccagcagcacggcctcctagtgaggccctggagacacctggtggactgcggtgagtggcatcctctccatgccagccagcacgttctgccggccaggtccagaaaaccagttccgcccattttgtggggttgcataattaatgatctcagagtagctacttcaggcctggcccagtgaggcgctcgacatcactggccttggtttcatgcttcccaccaaattggctccacatccagacaggctcaccctgaccacagtggctccacaccttgcagccactcaggtttctcagcccagcaggaaagagagctccgtgggtctcagaagctccagcatgatttgcactgcgtctctgtggcttcaactgactccttcttgtacctctcactgtggccaggggaatgtgagtctccgattgacttctgcctgaccgcgggctctgcccttggggagactgcccaggcagaagttgggatgaggttagcagtgggcagtagtactggctggtgcccaaaggacaaatgtctgcggcctctcacccttgtcctgctgccaagtgatctttgtcaagagcattaagcagtctttcaaacatttttgttggagacccacaatacaaaatatagttcatttcaggatctaattctattagttttctatctcttgctgctgtaacaaattgcaacaaactcagcagcttaaaataaca[137 bp omitted]tacaagcatgcaccaccacacctggctatttttaaaactttttttgtagagacagagtcttgctatgttgcccaggcagttctcaaactcttagtgtcaagcgatcctcctgctcagcctcccaaggtgctgggactacaggtgtgagccactgcacccagctaatttttatttatttatttatttattttgagatggagtctcactctgttgcccaggctggagtgcaatggcgcgacctcagctcactgcaacctccaccccctgggttcaagcaattctcctgcctcagcctcccaagtagctgagactacaggcacctgccaccacagctggctaattttttgtattttcagtagagatggggtttcaccatgttagccagatggtcttgatctcctgacctcatgacctgcccaccttggcctcccaaagtgctaggattacaggcatgagccacccctcccggcccaactccagctaattttttgaaaatgttttgtacagatggggtcttgctatgtcaaattttttcttacaattccaacacagttctcgctggcctaaaaatcaacgtgtctgcaggagtgcatttctttctggaggctctaggggagaactgtttccttaattatttaaattgttggctgaattcagtttctgatggctataggactgagggccctgtctctctgctggctgtaacctgagggttggtgtctacttctagaggccacccacattccttggctcatggccccttccatcattttcaaggccactaacagcaggtcaagtccccattatgcttcgaaatcccctgcctctttctgatggactctctggcctctgtctcccacttttaagagcccacgtgattacactgagcccagccagataatccaggttaatctctcccttcccaaggtctagaaccttaatcacatctgcaaagtccattttgccatgtaacgtatcacaggatacagcgattagactgtggacatctttgaggggctgttcttcagctgaccacaccaatatatgcatacacagcacacaaagtgtcaccaaataggaaaatgcactcaatactttgcattacattcttttctattctatttcatttttcaaagcagggaattatcccactgatctgtatagcattgagattgagaacacagatcccaaagtcagcctgccttggttaggatgccagtaccaccactttcagctgtgtgctcttggggacgtcacttaacctctccgtgcctcagtttcccctttaacaagagaaagaatggtgaaaataacacttctcttgtggggttgttgtgagagccaaacaaataaacagtagctggcaatatagtgaatatagtgaatgctctacaagtattagctgtcactatgaaattgattttttttttgaggggggatggagcctcactctgtcacccagactggagcacagtggtgtaatctcggctcactgcaaaattcacctcccgagttcaagcaattctcatgccttagactcccaagtgtctgggagtacaggagcatgccaccatgcccagctaatttctgtattttcaatagagatgggattttgccatgttggccaggctggtcttgaactcctgacttcaagtgatccacctgcctctgcctcccaaagtgctggtgagccaccgtgcccagcctgaaattgacttttaacctgtgttaacatcactctgtcctgagatcaaaaccacagggctctgctgttggcaggtcttgtcccagagtctgggtcagcctgtcctggggagggcctgggatcagcccggcccacaccctctccagtccagcaggcagctgagatgggtcctgagccatctttttatccctttggtgtgaatgggacaacgcgaccatttcacagatgaagagcagacacagagccgcacagctggggagtggcagggaggggtccccctgggcctgatcttgccctgggtgatgcaggggccagggcaggactgagaagtgccgggtctctgacctcgtagggcccacacgctgccagggtggccgagtctgtggtggggcagccacggcagagtgatcagggctcacatgagggaagcgtagggccacaggggagcacagaggaggggctggcccagcctggaaagtcaggccaagtttcccagaggaagggccacgagagctgaggcttgaatgacaagtcaaagccaataggtaagcaaggagaagccaaatgttctagggagaaggaacaaggttttcagaagcccagagactgtgtaaatttgagccagagatgggggagcctggagagagacatggtcctgggctgtgtctgtggggccttgaatggcaggcaagaagtgaggactttatcccgaaggactgggcctctaacctccaggaccccaaggcgcaactccttttctctgcccctagtccctcactcctctcagagcaggaagcaagttcagcatcttgcaaacaaaacctctctttgtccaaaggaaacagcccattgcaagctccgaaggccaacacaagggactggtggtgggtgctctggcctctggcctgcctggcccacccctcctcccaaagccagagacaagccccgggggcatcacacactttgactaaggttaactgaacacccactaagtgctaggcagcattctaggcgctgcagacacagcagtgacccaaacagacaaaaccttgccctcatggaggcgacattccagtggagaagacaatcagtcaacccagccagtaagtaggtgattaaacagtaagtcaggcggggcagggctggggagtgctggagaaggggcatgcagtattaaactggggggttagggttccctggggtgcagagaggtgccctgggagtggagactgaaggtggtggaaaagggagccgagctggctgggggagcggggaggcggggggacattccaggcagcaggaatccaggaaacccatccaggaagggtgcaggtgtctcctccagcccccagactctgggtgctcaaattaagatgaactttgagctggaatatctcccacatcccacccaggacatttctccttttctgactttctttattaatcctgagactgggggacacccccactccgccagcgcacacacacacacacacacacacacacacacaaaaccctccccagcaatctctcctccagtatgtttttcccctgatctgtgaaacccccaaagacaagggttagggatggggtctctcttggtcaccagtgtgtcaccagaacctaccataaggcatttaaaagcataggttagggctgggcacagtggctcacacctgtaattccagtactttgggaggccgaggtgggtggatcacttgaggtcaggagttcaagaccagcctgaccaacatggtgaaaccttgtctctactgaaaatacaaaaaaaaaaaaaaaaaattagctgggtgtggtggtgtgcactggctgaggcgggaggatcgcttgaacccaggtggaggtggaggctgcagtcagccaagatggtgccactgcacttcagcctgggtgacagagcaagactctgtctcaaaaacataaaaaaaatgaaaaagcataggtcagatctcatcagattcctgattaaaagcatccctgggtcccccttacctctgggatgaaaactgacctccaagcctcctcctaagaggcccccacagcggcctctctctgctcaccctgcctcctcctacactggctttgtctagctcactccacaccgagggtccagccacactggcctctctgctgtccctggaccacgccaaatgccttcccacccctgggtctttgcatctgctgttcccccggcctggaatgctctttcccagacgtacacacggctggctccttccatcattcaggcctcagctccaatgtcacctctgcagagaggcctccctagccactgtcctcaaatcagcccatggggctcagccactctgcgctacctaaagctgggtaacacagatctaacccagtttctcaatccaaaattatcttttatttattgctagtttgtcgcccatttcccccctctagaataggccagcacacttttatgataaaaggccagataataaatattttaggctttcagggccacactctgccacaactactcaaagcttctgttgtaacataagaacagtcatagacaatacacgaaccggcgagctggctttcatgaagacattatttatagacaccggaatttgaattttacatgattttcacacctcacaaaatttcctcttttggtttctttttttctaaccacttaaacatgtaaagactatttagattgtaggctgtgccaaaacaggtggagggccagatttgggcccaagggtgaagcttgtcaacgtctgccctagaacatctgttttatgaggtcagggatctctgtcttggtcattgctgtgtccccaggccctgggatgttcccggcatgtagtggatgccaaagttgaacaaatatgtgctatagaaaaggcttcgacacattcattaattcttccaacaaatatccattgaggtttgccgtgagctgggctctggggagatagcagggaacataatttgaacgtggggcagtgagttgacatccttgcattgaatgacttgtgttcctccagagctgacctggccccccgacagccactacgagctgtgtggcttctcctgtcccagctcctgcaccgagcctgccctgcccgacagctgtctgacaccatgccaggatggctgccagtgtgacccaggatttgtgctcagtggcacggactgcttgacccccatccagtgcagctgctccatggggggcagataccacctggccggggagccattctgggctagggagcactgtgagcaattctgccactgcgaggcttccacccatgctgtgtgctgctccccctcctcctgtgggccagggcagagatgtgggaccctaaggggcatctttgggtgccacccattctcccctggcacctgccaagcagccgggcactcacacatcatcacctttgatgggaaaactgttgagttctcaggtacctgtgtgtccgtctttgccgaatcctgtggctcttccggctcactgccattcttcaggatacagctgtgaaaggagaacagatccagcagccccctcatgctcatcttggaggtgtctgtccaggttaatgggacccaggtccacctgcggagggacagcccaggcatggctcagataagcaccagctttgggacgtgtcgtttctaggaaccccaacccttcacccaaacccataggcccaagggaaaaacttattctgtctccattatttctacattttacctctattttctgattatatgcccatttttgactatatccatcagatgcattcagctaatataacagaaacactctcagaccagcttaagaaaaaaaagaattactgatttacacaattgaaaaaaaaaatctacaggtgtatggattcaggcatagctggacccaggtgcttgaacaatatgtctcaaatctgtctcaatttctgggctctcctttccttcattttcagacaggcaccatcccatcccaccttgtagggacaaggacagctgccaggttagcaaatgtcactggaggaaaagtgtccctcactggcccagcttgagtcatgtgaccacccctgaatccctgatggactagctgattggctgggcctgggtcatgtgctggaagttaggataggattgactttctgtgaaccacatggattgattttggaggggtgagttctcagggaaatccagagaaaggagaaatgaatgcagaacaggataaaacaagagatggtcactattatagttatgtccttgttccttcatctaaaaatgttttacatgtattggtacggtggcttacatctgtaatcctaacactttgggaggccaaggcaggtggatcccttgagcccaggagttcaagaccagcctgtctcaagcaggcaatatagcgagaccccgtatctaaaaaagaattaggtgggtgtgttggcgcacgcttatagtcccagcttatagtcccagctacttaagaggctgaggtgggaagatcgcatgaacacaggagttcatggctgcagtgtgccatgattgtgccactgcatccagcctgagggtcagagtgagaccctatatcaaaaaaaatcaacatttttcacgtatttgaacacctactatgtgccaagcaacactgacccaactgtggtcctatgctcccgagccttcctttgattctgcctgctccttaggtgaatggtgagacaacagccctccccgtaagcctgaatgggggcagccttgccgtccactggaatggcctcttctccctgctgcagtcagactttggcctctggctcagcacagatctcacctacagccttaccctcaccctgccccacctctacaagggtcacacctgtgggctctgaggcaacttcaactgcaaccccagtgaggacgctaaggctgacattaccttggagaagcagagcaaggcttgtagggacagctgtggggctgcctgtccagtctcagtctgcaatgaccaggggcagattgtgtcagccaggaggcagtgctggctcctgcaggacccccaggacccttcagccactgccactgggagatcaacccagacccatatgtttccagctgtgtcgatgatttgtgtcttgctggggatgatgaccacatcctctgcctggccctgcagacatatgccgccatctgccagggcgccaacatcaccatcaggcactagaggaattcttccttctgtggtgagtcatggttgagcagggcaggaattcatctgcatgctctgtatggccacacacagactgacatccttctgtactcctgggctgcctgagtgccccaaccacttcccatattcccaattccagcacaggaaggccttccaggttctcctcctaggctccagctggacgcatgtggattggtagggggcctgtatgctaccgactgttatgtttttttttgttttttgttttttttgagacagagtctcactctgtcacccacgctggagtgcagtgacttgttcttagctcactgcaacctcctcctctcgggttcaaactattcttctgcctcagcctcccaagtagctgggattacaggtgcccgccatcacgcccagatgattttttgtatttttagtagagatggggtttcaccatgttggccaggctggtctcgaactcctgacctcaggtgatccgcccacctcggcctcccaaagtgctgggattacaggtatgagccatggcacccagcccgctatgtattttgaataccaccctgggttgactggatccctggccccctgtcaaggggatgtccttttccaccctcagaatgcctgacctgagatgccacaataataatcccaacaactgctaatacttattgaacatctacaatgtcccaggcatggggccgaaggctctgtgtacctcttgccgccactgtctcagaaacaccctgcaagtgagaggcaatgactgttattattcccactttacatttgggaaaacagaggctcacagaggtaaagccatttgtctactgctaatcacaacagacagagttgagacttgaactaagactttctttctccagagacaaaagaagttttattactagccatatcatctaattctttctttcttatttaactattatggaaaatttgaacataaaagtagagagaatagcctattgaatgcccctgtacccagaaggcagcctcaacaacagccaagttgtggccgacctgtgtccacctccacccctcccttattgatttattttgtgtaaagcaaatcccagacaacgtgtaaacctgtaaatactccagcattattttttttaatagataaggacttttaaaaagaaaaaaacctgctgtggccgggcgcgtggctcacgctcacacctgtaatcccagcactttgggaggtcgaggcaggcggatcacctgaggtagggagtttgagaccagcctgaccaacatggagaaaccccgtctctactaaaaatacaaaattagccggcgtggtgctgcatgcctgtaatcccagctactcgggaggctgaggcaggaggatcacttgaacctgggaggcggaagttgcggtgagctaagattgcgccattgcactccagcctgggcaacaagagcgaaactccgtctcaaaaaacaaagacaaaacaaacaaacaaaaaaacctgctgtgatttgctcacacctaacaaaataagcagtaattcccagatatcatgaaaagcctagtccatgttcagatttttctgatcgttcctaaaacatccggctttcctcccttgcaccaaagctttgctggcccctaatgcttgcccattaagggttcctagctggttccaacattaggggcgcaatcggggcaggtcatgttctacggggtgggggtggaaggtgccgctttcttgctcaaccaacaggcaacaaaagcctgtccgataccatcctggggatcaagacacccctaaaaccaggttctaacccacctatgttagatccaaatgtgaatctctgacacctgggccgtagggaaccctcaaagggtttggaatagggaaggcggggagcggggtggagtgggggggaggtaagacagtgttcatggagtgagaaaggtgggccacctaggggctatttctggaataacaataggtcgcatttatccaaggttcccagggtgccaggcgctgtcccaaccacttaatttattttaacttgcttaaccctcaaagtcagtttgaggtcagtactcttttcggagagatgggtacggagtcctggagaggttaagcaccacgacagagccgagattttaagcactcggtcagggagttgggcaaatgtggcctgcagatcatgtttccttacccgcgctttttctcctccctgcatagccgccacgtgtcctaagcacagcagctaccagcaacgcttggacccgcgccgggtgcagctctgcgtccccgcggccgccctgcctgctccgagggctgcgccaacgataacgcgcacctgtgggcaggggccaggtgccggcacccgaaggagtgcggctcggcgcacggcggcccctcctaccaggtgagctgggggcagggtcttgctgttgtgagggggtcggcccatcatgggggtcagggagcccccaaaacatgccagggatgggcgcccaatccgggacacctatattcaattgtgcggatggcacattgtgggttcacaatgtgttgacctgctttattattgatgattccaatactgctactagttactaaggtcattccctgtgtgctaagtgcttaataatattattattggctgggtgcggtggctcacgcctgtaatctgagcgctttgggaggccgaggccggcggatcacctgaggtcaggagtgtgagaccagcctggccaacacggcgaaaccccattctactaaaaacacaaaaattagctggatgttgtggtccacgcctataatctcagctacttgggaggttgaggcaggagaatcgcttgagcccggaaggaggaagctgcagtgagccgagaaggcgccactgtactccagcctgggcaacagagcgagactctgtctcaaaaaatatatgtattattattattactgtcagcactattgactttttaaaatattagccatcacttattgagtgcatagcccccactacacactttggcaatgtaatagtagtaataataacaataatcaaaacagctcattttatttatcattaataggtacaagactctgtcctaaatgttttagcattgtggtcagtgctattttttgtttatttttatttttttatttttattttatttatttatttatttttttgacacagggtcttgctctgttgctggggctagagtgcacgggcgccatcttagctcactgcagcttcaaattccctggctcaaatgatactccccctcagtcacctgagtagctgggacttcagttgcgtgccaccatgtctggctaatttttaaattttttgtagagatgaggtctgaccgtatcgcccaggctggtctcaaactcctggactcaagggatccttctgcctcagcctcgcaaagtactaggattacaggcatcagccaccacacccaaaccatttgtattattttgatggccaacatttgagtagtgatcacacatcaggtcccatactgctaataataataattaaaatgtggccaggcgcggcggctcatgcctataatcccagaactttgggaggctgaggcgagtggatcacctgaggtcaggagttctagaccagcctagccaacatggtaaaacccagtctctactaaaaatacaaaaattagctgggcgtggtggtgtagcaggacgagctgcagacaaaacccctcagacactgagttaaggaaggaagggctttatttggccaggagcatcggcaagactcacgtctcaaaaaaccgagctccccgagtgagcaattcctgtcccttttaagggctcgcaactctaagagggtccacgtgagagggtcgtgatctattgaacaagcagggggtatgtgactgggggctgcatgcaccagtaagaacagaacagaacaggacagggattttcacagtgcttttctatacaatgtctgtaatctatagataacataactggtttggtcaggggtggatctttaactaccaggcccagggtgtggcgccgggctgtctgcctgtggatttcatttctgtcttttggcttttacttctttctttggaggcagaaattgggcataagacaatatgaggggtggtctcctcccttagtggcaggcacctataatcccagctactcgggggctgagacaggataatcacctgaacccgggaggcagaggttgcagtgagccgagattgtaccatcgcactccagcctgggggacaagagtgagacttcgtctcaaaaaaaaaaattttaaatgtattgggggctgggcacagtggctcacacctgtaatcccaacactgtgggaggccaaggtgggcggatcacttgaggtcaggagttggagactagcctagccaacatgtcaaaaccctgtctctactgaaaaatacaaaaataagccgggcatggtggcacatgcctgtagtcccagctacttgggaggctgaggcacaagaattgcttgaacccaggaggcagaggttgcagtgagctgagataacaccactgcactccagcctgggtgacagagcaagactccatctcaaaaaaataattaaatgaataagctaaaatatattgggtatttactttgtgttcatgcctgggctaagcattttatgaatagtaataataataataatggctaatatattaagagtttgggcatttacaatgtgccttgtgtaagcatattaaaataatggtgatattaacaataataatggctggtatgtaccaggcatctgctgtattgctgtgctaaccagttaatgatatataatgataaccatcgtgaacatattttggtcatttgctgcgtgtgtaatcctgtcatcgggataaaaggtaatattttctgagtgcttattatgccttgagcactgggccagcatgttattaataatggtatcagatatatgtcaagaacttggttactgtaggccagctgggtggtgagagcctcatgcgtatgaccgcactgaccttcaaacagccctttgattgcctccaatgtgcagagggggaaactgaggctacaggatgcacagagatctcaagggacagagctaggtctggactccaggtctctctgaccccaaaattgtgctgctaatcactaggctgtgctttccactgagagaaagcaggtgtcacaagtttgctgccctctgggtaaggcagtagcctgtcatgatggtcagacccccagctgttgaatctgggcatggcattcctgcccatcccatgctgagccggcccctgagcctctgctcttctgggtcagctgccaggccagcctcgggcctccaccaggccctgtttgggtccacctgggctgggctgggcagggcatgctgatctggcctccgacctggtctggctgaaccgatgcacccgccgctgcagctgtgacagaacggggcatttccgctgcagcccggcgtgctgccccactgggaagatctgtggtctgcagggtggccagctgggctgccagagccccctgggcacctgcatggccactggagatcctcattacttcaccttcgatggggccatagcccacttccagggcacctgcacctaccacctggcctatgccatccatccattcatccatctatcatccatccactcatccatccttccatccattcatccattcatccatccatccatccatccatccatccatccatccatccatctatccactcatccatccttccatccatccactcacaaaatttttctgagtatctactttgtagcaggccctgctgtaggctctggagacacagcaaagaacaaaagagacaggtctcttctctcctagagtgcacattataatagtgagagacaaacagtaaaaaataaatacataatatttcagatggtgataagtcctagaaaaataaaactagaaaggagaatcaggagtgcttgtgagtatggggtgggagttataatttttaaacagggtgagcaggaaaagcctcattgaggaggtgactttggagcagagacttgctggagggaaggagaagccttatgagcaatgagggaagagccctccaggcacagggaaccttaggtgcaaagtccagacgcagaaatgcccttagccttattaagaaagaacagggtaattccagcagtttaggaggccaaagtggatcacttgaggaagttcaaggccagcctgggcaacataggtgagacccccatcgctactaaaaattaaaaattaaaaaattagccgggcatggtggcacgtgcctgtagtcccacctacttgggaggttgacttgggaggatcacttgagcccaggagttggaggctgcagtgagccatggtagtaccactgcacttcagcctggaggacagagtgaggctctgtctctaaaataaaataaaataaaattttaaaaaagaaagaaagaggctgggcacagtggctcatgcctgtaatccaaacactttgggaggctgaggcgggcagatcacgaggtcaagagattgaatcctggtcaacatggtgaaaccctgtctctactaaaaatacaaaaattagatgggggtggtggcacatgcctgtagtcccagctactcgggaggctgagacaggaaaatcgcttgaacccaggaggtggaggctgcagtgagctgagatcgcaccactgcactccagcctgggtgatggagcaagacaaggaaggaaggaagggagggagggagggagggaaagatgaaagaaagaagaaagaaagaaagaaagaaagaaagaaagaaagaaagaaagaaagaaagaaagaaagagaaagaaagaaagaaagggagagagagaggaaggaaggaaggagaaagaaagaagaaaggaaaggaaaggaagaaggaagtaaggaaaagaaaagaaaaggaaaagaaagaaaagagaaagaaagaaagaaagaaaagaaagaaagaaagaaaagaaagaaagagagaaagaaagggagagagaggaaggaaggaaggagaaagaaagaagaaaggaaaggaaaagaaaggaagaaggaagaaggaaggaaggaaaagaaaaggaaaagaaagaaagagaaagaaagaaagaaagaaagagagagagaacagggaggccagcggccagtgtggctggagtggagtaaacccggggagagtaaggggtgaggtcggagcgttaatggggacagatcctgtagggccttgtgggtcactgtaaggactttggctttcactcagaatgggttgggagttccagggatttcagggagggctctgagcccaggaggcccctgatctgactcaggtgtcagcagatccctctggcttcatgcagtggacagatggccgaggacctggggggagcaggtagactggagaggaggctgacagaattgttcaggcagaacgtggcagtggttggaatcaggaagagggcagtagagggagtgagacatggttagattctggaaatattttgaaaggatcagctgtgggatgagagagagggcaggttccaacatgatttggtttttggcctccgcgtcctggacaagctgccactgcctgagatggagaaggtaggagaggaagcttggggtaagattaggagttcagatttgaacgtggggagttcgaggtgcctcttttctcccagagctgggacacagcaggatgcagacacctggagttctaggactggtgagggcatttgggaattgtcagaatacagctggggtttaaagccaggcaagtggatgagaaaagtaagggaagggaaacgaaggggaaggggctaaggtgaacttggcagtgtgaggtgtgaggtccttggtggcatggagcagacagctcggcttggagattcatacaccttacctgctgtggggtcatgaggagtgtatggatggcactagggggtgggagatggtagggggaaatggatcctgagctcttcccctgcactgcaggtggacagccaggcggtaagcagggcctggtgctcctgcaggtgggcacctggctccaggtacagttcaatggccacaatatgctgttggtgtgcgtggggcctgagttctggagccacctctgcggactctgtggcaacttcagtggcgaccccagtgatgacaaggtgctccccagcagggtgcccaccctcagtgatgccatctttggcaacgcctggtggacccaggacagccggcctgggtgggtggctgcctgggaccaggaagggcccgggttgggagaaatacagggctcagggaaaacagtgggcagacaggcaggctttgagaacagaaaggtggaagaagagggtgtgaattgcacacacaactctcaggagattgattcaggtagaatcaggaacaatgattataccctttcacggatggggaagactgaggcatggaagggcgaagcatctgcccaagttcccacaataagaaatgatggaacgggccgggcatggtggttcttgtctgtcatcccagcattttgggaggccaaggcaggaggatcacttgagctaaggagtttgagaccagtctgggcaacatagcaagatctcgtctttattaaaaaaaaaaaaaaaaaaattagccaggcctggtggtggtgcacacctgtattctcagctacttggaggctgcggcaggagaatctcttgagtccaggagttcgaggttgccatgagccatgctggcaccactgcactgcatcctgggtgacagagcgagaccctatcaaaaaagaggggaaaaaaatggtggaacagggatttgagtccaggcattctggcttcagggtccctgatcctaaatactccacccccccacctctcacaggggaaacaggaagcactcctcacagagaccttatttatttatttatttatttatttatttttgattcctgctccgtcgcccaggctggagtgcggtggcacgatctcggctcactgcaacctccgcttcccaggttcaagtgattctcatgccttagcctctcgagtagccgagattacaggcacacgccaccatgctcggctaatatttatatttttagtaaagatgaggtttcaccatgttggccaggctggtcttgaactcctgacctcaagtggtctgcccacctcggcctcccaaagtgttggaattacagccatgagtcaccgtgccagtctcccttcactgagaccttagtcctgcaaagtccaatgcaccaaacacacgtgctatttaaatttatgtgtaaattaaattaaacatcttctgtcacactacctatatttcaaatactcggtagcctctggttgctagtgcctgcggtattggatggcacagacttggggattcgtccaagtagcagagctgggatctgaagctaacaaagttggttccagaatccaggatctaactaataactatcctggctgggcgtggtggctcacacctgtaatcccagcactttgggaggccaaggtgagcagatcacctgaggtcaggagttcaagaccagcctggccaacatggcaaaaccccgtctctactaaaaatgcaaagattagccggctgtggtcgtgggtacctgtagtcccagctacttgagaggctgaggcaggagaatcgcttgaacccgggaggcagaggttgccaagagctgcgatcgcgccactgcactccagtcagggtgacagagcgagactctgtctcgaaaaaaaaaaaaaaattaatgactccctcatgttgagtaactgtatgaaaatcatttgttactatggggttgaggtttttaaacgtgtctaaaactgcaccaggagctgtcagctgctgggagggagaacctggtgcgggcagaggaggactagccaagggtggccaggggggaggcaggaggaggaggaggcttggaggtggtggtgttgagtcctgtgatcccccagctgccggcgggaccctggtggcgctgagccctgccaggacaggccccgggtggagcagctctgcagtgttctggcaaaccgctccgggcccttggccaagtgccactggtatgagagccccgtgtcctacacgcaggtgtgtgtctctgacctctgccagtatggcacgggcaaccgcatgctgtgcaccatgctggaggcctacgtccaactctgcgccctgcgctgcgcgttgcctgcccgcgtggcgagccagcctgggatgcagttacgtgctccttccctttcaccgcccccagctccaacgatggcctccccacttggctagctaggatgcctccttcgccggtggatcggaagccctcatccccagggagaccccagccctgcctaggatgttaacccaagcttcaagccagaccagggctcctcttgggcccttcctaatcctacctctcacctcccagcactggaccctatattgtccgagttgctcactgtgtgctgcaagtttgaagtggcctgtgggtgtgacatgcataacaaaccacgtggttaaaagtttcatcggaacaatcgggaggctgcagtgagctgagatcatgccattgcacttggcctgggcaacagagcaagaccctgtctggaaaaaaaaaaaaaagaacagtggcagtttgggaatcgtcctgtggttcattcctgcccttccctcccctgcactcaccctgatttttttctccctctaattgagggagcaaaggtttcagggttgtggcctctgggcgatctttcccctcccccaggtgtggcgtgtccagccaacagctactatgactcctgtgggccacccttcccggccacctgtgctagcctcaactcctccgcgccctgcaccctccagtgcacagtgagctgcttctgcctcgagggctttgccctggaggcgggcatcttcggtgccccacgcttgctgcggctgccacctgcagggccgctatatccgcctgggtactgaggtgctgcctgcagccccctgtgatcagaggtgcgtgtaccatggacctggacgcccgctcgagtgccaccctcatgcctgcaggccctgtgagctgtgctgccagcacaggggtgtctggggttgctaccccatgcactacgggacactgtggctgtacggagacccccacctgcacactttcaatgggacccaccatcaggttcaagggcctggctgggagatattggctagaacatgccggccacaccacagcgcctatgccatctgggtggagatcaggcgccaggagccgtgggatgccatgtgggcccagcaggtggatgtggatgtggcaggatggcagctgtcactgctggcaggacagtttggagccgtccaggtacttgtcacccagctctggtcctgggcctccaggaactctagtgagtaatgagcgtgaagaacagcaacgccgggcgtgggagctcacgcctgtgatcccagcactttgggaggctgaggcaggaggatcgcttgaggccatgggttcaagactagcctggccaacatggcgaaaccctgtctctataaaaaatttaaaaatttagccacaagtggtggcacgtgcctatagtcccagctactcaggaggctgaggtgggaggatcatttgagcccaggaagtcgaggctgcagtgagctgagatcacgccactgcactctagcctgggcaacagagaccccatctcaaagaaaaacaaaaacaaaaacaaacacaaacaggctgaagaaatggtggtggcccaagggccttccctttggagaaagagctactgggacctttagaagtgggcagagggccccagccctgagcttcagaggatccacccgctttggcctcttctggctgcgtcccactccgtgggctttggagtcctctgggaaacgcccctgacccctagagcctggagcctgcatggccctccccttccagaccgtgctccaggaatgggaattccctgcctaaaaggctcagagctgcttccagggtccacgctggccttgtccccaggtccatcctcacaagagtggaccatgcggcccacatgacgcattctaggcagcattgcaggaagccagtgtggacccagctgggcagagcggcccaggctagatgtacggggatgcagtgcctcttgcagtgagggccagagctggggctgcacagagaagagacgggcccagggcagtctctccttggatgccagatcctgtccaggaaaagttggaaattctgattttgcacctgaccaccaggacgctagggaggtttatgcatcaaggcaggaggatagaccgtattccatgtaatagtgtggcagcttggtttgtaatcttaaacatgaagatgtgtaaggtgtgtgcctccatttctactcttgtctgggcccctcagggttgatgggtgttgggtccacctggggttcggtggatgctttagctggcaacgtggtaacacggtgaagcctgtggtgatgggcccaggggaccaggactgagtcccactgtgccatttgctagctgtggaactggacctagtggctttacatctctgtgcctcagtttcccatctgtaaaagggaagtgaatggtacctacctgtatgtgaggattaagaggtgtgaattgtctaggagaaggcatttagtaagggcataaaagcatttgatcaataaataacacaggtgaggtgtgatggctcatgcctttaatcccagcacattgggaggctgaggcaggaggatcacttgagcctaggcaacatagcaagaccctatctctatttaaaatttacatttaaaattaaaaaataatagtaaataaataaaacatgtaactgcaaagtcaagccaacgttgtaccactagtgctgcatccccac[138 bp omitted]tataatgaaacccgtctctactaaaaatacaaaaattagccaggagaggtggcatgcgcctataatcccagctactcgggaggctgagacaggagaattgcttgaacccaggaggcagagtttgcagtgagctgagatcgcagcaccattgcactccagcctgggcaataagagcgaaactctgtctcaaaaaaaaaaaaaaaaacaaacaaaactgaactcaggagccaggtgtggtggttcgtgcctgtaatcccagcactttaggaggccgaggcagacagattgcttgagcccaggagtttgagactagactgggcaacatagtgagaccccactctacaaaaataaaaaaaattaggccgggcgtggtgactaacacctgtaatcccaggactttgggaagccaaggtgggtggatcacctgaggtcaggagttggagaccagcctggccaacatggcgcaaccccgtctctactaaaaatacaaaaaattacctgggcgtggtggcaggcgcctgtaatcccagctacttgggaggctgaggcaggagaattgcttgaacctgggaggcggaggttgcagtgagccgagattgtgccactgcactccagcctgggcaacagagcaagactccgtctcaaaaaaaaaaaaaataaaaaaaaataaaaaaataaaaaattagctggacatggtggcgcatgcctgtagtcccagctactcaggaggctgaggctgaggtgggaggatcagctgagtccaggaggcagaggctgcaccatgcacttcagcctgggctacagagtgagatcttgtctcaaaaaaaaaaaaagaaaagaaaagaacaagaaacgaactcaggtcacattccttctgtctcaacgccctcccatggctccacctcactgagtgaaactgtggcctatgtgaccctacaaaactggtttctgtcacctctctgcccttgtcccctcccacctgcccctcactcactctgctccagccgcagtgacctcctagtgtcctcccatactccaggcaggctcccacctcagggcctttgcacaggctgttccctctgcctgaaacactcttcctggaggtcctcatataactgatcattctcatctttcaagtctcagcacaaatgttaccctctctgagaagccctccttgaccacacacatgaaaagaaccaccactcccaccctctctctactgtaaccctactccttttctttttttttttttgagacagagtcttctgccgcccaggctggagtgcagtggcgggatctcggctcactgcaggctctgccccccggggttcacaccattctccttcctcagcctcccgcgtagctgggactacaggcacccgccacctcgcctggctaattttttgtatttttagtagagatggggtttcaccg[140 bp omitted]gtcaatcatttctttgtttatgatctatcttccttttgacagaatatgtgttcttcgaaggcaggaacttaattttgttgaaaaatagacaaaaatccctgggagaaagacaataaacaaatacagaagtaaatttatggtatgtcagaaggtgacagctggttctggagaacaaaaaagcaggaaaggggtgaggggccagtaagggtgttgccctttaagacagggtaacaggccaggcacggtggctcatggctataatcccagaacttgggaaaccaaggcaggaggatcgcttgagcccaggagttcaagaccagcctgggcaacatagggagaccccgtctctacaaaaaatcatgtaaattagccgggcgtggtgatgtgtgcctgtaatcccagcacgttgggaggctgaggcaggaggatagcttgagcccaggagttcaagaccagcctgggcaacatagtgagaccccatctctacaaaaaatcaagtacattatccaggtgtgatggtgcgtctgtagtcccaacaagtcgagagactgaggcgagagaatcacttgagcccatgatgttgaagctgcagtgagccgagatcatgccattgcactgtagcttgagtgacagagcgagaccctgtctccaaaaaaaacaaaaagggaagcagtgaagtgtggagcagagatcggaaggagagaccgggagccatgtagatacaaggggagagtgtccaggcagaggagcagaggctggaagggtgcctggtgtgttggaggagtggtggggagacccggggagctggcgcagagtgggcagatgagtgaaggggtgtgtgagacaagatgaggacagaggggacagaggtttattttgtgggactgcccaggccacggtggcgagtttggattttctccaagtgtactagggaggtatggaaaggttttgagcaaaggagggataggatctaatgtgcgatttcaaagggctccttgggtgctatgtgcagagtggatctcagcagtggcaggagcaggggcccaggaggggcaggtgtctggacgtggttgcccgacgtagcctgggtgtctgtgttccaggtgaacggctcccaggctggcctgcccctgactctggctggggggcacactccaggccttcttcacgcccttggccatcacagtccaggtggcacccggcctctccatgacctttcacgaatcccatgccctctgagtggcagtgcctgagacctacaccaacaccctctgtggcctgggcggggacttcagcgtggatacccaggatgacttcagcggctctgatagcacatggctctctgatgccaacagcttaatgggggcccagcccctctgtgcccaccagacaaggcagccctataccaggccttctgtggcttgctgggcacccaagatgggccctacagggcctgcagtaaggacgtggatccccaggtgcatgtggagaactgcatccatgacctctgtgccacggggggctcaagagagactctgtgtgccatactggggagctacgcccaggaaagccagcagcgcagcgttcccatgcagccctggagacacctcttggcctgcagtaagtgggtattcccagggagggtctttctcagcctgacctccccagctggcccaataccacttccaggatgtcctcctaggtcaacaccacccaaagtgacccactgcatgcctttctggctaactgttcccgcgaagaacctacctgcttaaaactctgcaataacaataacagatgacactgagtgctattgcatcagtcaggatggtctgggttatgctgaagtaacgaactaacctgaacatgacccagcatgaccaaggttgtttcttcatcactatcttcgtcacctttgtcatcatcacagtcactatcatcattaccgtcaccatcaccaccaccaccagcgtcaccatcaccaccaccaccagcctcaccaccaccaccaccaccagcattaccatcatcaccaccaccaccatcaccacaagcattaccatcatcactaccaccaccatcattgttaccacaaccacaaccatcaccaccatcaccatcatcattgttaccacagccacagccatcatcaccactaccatcaccaccatcatcaccatcaccaccatcaccatcatcatcaccaccaccaccaccatcaacatcatcatcaccatcataaccatcaccaccagcatcaccatcaccaccagcatcagcatcaccatcactactataatcaccatcaccattatcactaccaccaccatcattgttaccacaaccacaactattgtcatcaccaccaccaccaccctcaccactatcatcactgtcaccatcaccgctatcattaccatcaccatcaacaccatcacatcaccaacaacatcaccagccctaccaccatcatcatcattactatcaccacgaccaccaccaccaccattatcaccaccatgatcacgccaccagcattatcaccaccgtgaccacgccgccaccgttaatcaccgccgtgaccacgccgccaccgttatcaccgccgtgaccacgccgccaccgttatcaccgccgtgaccacgccgccaccgttatcaccgccgtgaccacgccgccaccattatgctacatcctgatgatgcctccacctcccctcctttgcctttatgacttacccttggcccccacaaccctctctccgctcccttggtcctattctggttggaaatgctccagaatagtaatgcttgctcaattatttaactcctacctgttttcttccagagctggcctgtcctccccgcagcaattacgagctctgcggctcctcctgtcctagctcttgtgccgagcctgccctgcccgacagctgcctgacaccatgccaggatggctgccagtgtgacccaggctttgtgctcagtggcatggactgcgtgcccccaatccagtgcagctgctccatggggggcaggtaccaccacccggctggggaggccttctggactggggagcgctgtgagcaattctgccactgccaggcctccacccacgccgtgtgctgctccccgtcctcctgtgggccggggcagagatgtgagaccctcaggggcatctttgggtgccacccactctcccctggcatttatcaagcaaccatgcactcacacgtcgcctcctttgaccggaagagtgttgagtttccaggcacttgcgcttctgcttttaccaagtcctgtggctcctccagctcattgcgccttttcaaggtggaaattgggaaggagaaacaagtccagcagtcccattgtgttcatttcaaagatgtaggttcatgggacccaggtttgtctgcagagagagccccgacctgatgaggtaagcactcattggcatctagagactcttgaaccgattgaagctaaaagaaatacattggctcaaactaagtaaaaatcatgtgatagcctagtgaaagtgtagagattctgggtccacagaagttccctatataccactttggctgttttggttacagaaagcctcataaaaggtaactcaaaccagtcacagactgtgttttatgatttttagactaattacataactgaaaattccagagggagatcaggcatggtttgatcagggtgctaactcagtttttcagcatttctcttggtctgtgtttctctatagcattagctttgtcctcaggctggcttttcttgtgatggcaaaataactgccaattttccagtcattaaatgtgtattccccattgtccaaaacccgaatcttttcttaccccaagtactcaacaaaaattccaatgcttcactttgattaaaccccactgagccaatcagtgcagcccagaggttttcttaagcctatctaatcctactcaggagttgtaggtgggagagatcctgcccctaccccccatctctggcagctacttcttgcagggagagagggcaaaatgggaatccacccctgtgtccctatgtcccccgaaaccagtatttcttcttaacaatcttcaaagagtgtaaatgccctggtaaacctccactctgagacctgaaacttttgtctagaacccacaggggtggatgtgttttctaggcccgagggcccctgcctacaagagttccattgttggctattggaaaacacacagccacacccctcccactccacccccttccaggaagggaaccagctttcagaattagtcatgctgtcagcgtcccacacaacgagcccattgactccaaagggcagcacagcagatggactgctattatcccagtggtacagatggggaaactgaggcccgggaaggcagacttgcttgcctaatgtcgcataaggagaaagtggctgtgctaggattggaacccaggctgtcaggttctgagcccttccctttctgtctgtgggcctactgtgtgctcccaaaaagctgtggccaaattaaggaggtggcatgtctgattcatctgtggcggggcctgggatatatagtaactctcaacaatggtgttcattagtccgggcatggaggctcacgcctgtaattccagcactttgggaggccgaggcgagtggatcacctgaggtcaggagttcgagaccagcctggccaacatggagaaaccccatctctactaaaaatacaaaaaaattgcactttaggaggctgaggcgggcagatcacctgaggtagggagttcgagaccagcctggccaacatggagaaaccccgtctctactaaaaatacaaaattagccaggcgtggtagtgcatgcctgtaatcccagctactcgggaggccgaggcaggagaatcacctgaacccgggaggcggagattgcagtgagctgagataacgccattgcactccagcctgggcaacaagagcgaaattccgtctcaaaaaaaaaaaaaaaaaaaagaatggcgttcattcatccactcattaaaaacttcctgagcacctactatgtgccagaccctgggctcagtgctggggaaacagcagtgggtggaacggtcaagatctctccatcgtggtggagctgagattccagaggagagagagacaataggcctcaccagtatgaattatatagtttgtcaggaggccgtatgcgttcgtgtcagggaagaacatacagaacaggatggggaggggcggtggtggcttccagatggaaaagatggttttaaattgagaagccaaggaaagcctccttgagaaggtgatatttgagcagaaccccaggagagaggcactcatgtgcacatctcaggggtgagtgagtcccgcaggggctggatggggcctggtgcattggacgagccacagggaggctggtgtggctggagctgagcgaggggctggggagaagagacgatgaggtcagagaggtgacggggaccagatggtgggggacttatggggctagtgaggacttcgcttttgcctggagcgaggtgcgccgaggacagggctctgagccaggtggcccctgatgggactcaggtggtcccaggctccctttggctgcaggtgggaacagactgcggtggggcagggaccagagcagggagaccagggaggaggctctgggacgtccaagctggaggggacaaaggctgggccagggtaagggcagtgggaggggagaagtggatggttctggaaatattctctggggtcttatcccctcttcaaaccctgctgactgttcctggggccctcaagtttacgtgggcccctggttttgtttttgtttttgtttttgttttttgagatggagtcttgctctgttgcccaggctggagtgcagtggcgcgatctcagctcactgcaacctctgcctgccgggttcaagctattctcctgcctcagcctccagagtagccgggattacaggcatccaccactatgcctggctaatttttatatttttagtagagacagggtttcaccatgttggtccgactggtcttgaactcctgacctcatgatccgcctggctcagcctcccaaagtgctaggattacaggcgtgagccaccacgcccggccgcccctgttgtttttagtactccgtgcactccctgcaatcacacagggtgtgtgtgcagccagacgtggggtggaatcctgactgcccgttaattaactgggtgactttccgctaaacaactaagcccgggtgccgcagtttccctaagtggaagaataactctccgcaggcagttaagtcctgcagccacaagcccccggattattggttgagaatagagagacagtcagcaatcgtaggtaaatgactcaggcccgagcaggggtgtggcgctggcgcaggctgagtgcggcactgccttcttggataccagggtgcagggggaaggggatgtggagatgggtcccggctgccagcaggctgctgggtcagtgcctccccgcagctgagggtgccagccaggatcttagaactgcagactcatggtcctgcctctgcagccaggagggagcctgccagccccagcaccagcctcagagccttggggctcccaccgttagggggctggggctgggtggccaggaggagttaagtcacccacagccaggaaggggcagagctgggacccaaggggctgtgaacggtgaactcatccaggaggaaggagaaggaagacattgtgggagggccaacaagaacacaggcaaaggaaaaatatatagacagtaaaaggaaaaatatatatagataaaatattcaatatataaactatagtaatatacataaatatagagtttcttaagttcatttaaattctgtttccttaactgttagtttacctggttctaaatttacttttccttccactttttcggtgttgttttttatcttgtgatttattattttgtgttaactttaatattacatttttaagggctgggcgcaatggctcacgcttgtaatcctagcactttgggaggaccaggcgggcggatcacttgaggtcaggagttcgagactagcctggccaacatggtgaaaccccatctctactaaaaaatgacaaaaaattagccgggtgtggtggcgggcacctgtaatcccaagctactcagaggctgagacaggagaattacttgaacctgggaggcggaggttgcacagtgagccaagatctcaccactgcactgcagcctgggtgacagagcaagacattgtcttgaaaaaatatattgtttaattgatttttttccccaacttttgagattttcgactatagaaaagtcatgtaacccgtacaatccactcaaatacccttcacatagcttcctcaattcttagtattttgcctgattcgctttatctctttatatctatgtaattttcttctgagtttctgtgtctcacttttcctgtccctatttacttgtccaggcgttttcaaaagactcagtcttctctgttgttggttgaccaataaataaatatttagcctttttctggagggagatcacaaaacaggacagagctcttcctgaatccttcaggcggattcgccctctcttcctgttctgcggaggacagtcctggggcctttgctgtgtcaaccatgccccgaggcaccccagaagctgcatctgtcgagtctgtgctgtaatcatggccttgaaggtggaaggcaggtctgagatgggaggtgacaggagcaggtctgggccggagcaaccgcaagcgcccgtctccttctctccctccctccctccctccttccctccctccctccctccatcaaaccaggcagagctggggcctggggcaccccagggagacagacctgccacctcagcaatggcttccaggtgggaatgggggtcttttagtccagacttttccagagatgctggaaacacagcttgtcctgctgtttaaatgtttgcaattattaatttttgcaatgctttgtaaaaactaaaggtacaatagttgggttccaccctgggaccgccagtttgcaatccttctcttagggactgagtcaggctggggggggggggcgggctgcagggctcccacttgaaccagaagtccctgtcccagatgtctagctccaaatgtgttccctgccctttcctgcttccctgtagttcctgcccgcacccaggacccccagccatctgcccaagccctccccacccccaccacgccgcccccactccccacatgatggggaagctggccaagacattcattcctccacaccccctgcccccatcagcagctccaccctcagcacccccacctcagctcctcctgcaaggcctccgtggatggggggtggcggtggagaaagcctttcttttataattgttttaaacctacttttatttttatttttgtagagacaagatctctctatattgcccaggctggtcttgaactcctggactcaaaggatcctccagcctcggccccccagagtgctgggattacaggcgtgagccatggtgcccagcctggtaattaacagatacttcgtgaccacccactatgcaccaggccctgttctataattcagatgaaaatccctgagaggagctgacgtgctagcaggggaggcagatagcaccacaaaaaaaaaaaaaaaaaagcaaacagaagtcaaaaggtcatagagaggtcagggggtaggtgcgatggtggtcggggaaagccacttgaacctcatggctttgagctgtccagatgcgggagaaaagagagccaggcaagggaataggcattgcaagggctcttggccagaaacatgcctggagtgatccaggaacggcaaggaggcccaggtggccggagcagagtgagtgacaacaggggttagggggaaccctgaacctcccctgagtttccctagtctgtaagatgggggtctccaaccggtggccccagggccttatccaaccactggatatttttcattctgtctacaaagtgttaagaaaacgaagttaccaacatttaaaaatcagggccgggtgcagtggcttgcacctataatccctgcgcttcgggaagccaaggtgggaggatcacttgagacccagagttcaagaccaggttgggcaacatagcgagacccccgtctctaaaaaaattaaaaaattagccaggtgtggtgacgtgcatttgtagtcccagctacaggggaggctgaggtgggagaatcacttaagcccaggagttggaggctgcagtgagccatgattggaccactacactccagcttgggcaacagagcaagaactcaccttaaaaaaaaaaaatccggaaggccgggctcggtggctcatgcctgtaatcccagcattttgggaggctgaggcaggcggatcacttgaggtcaggagttggaaaccagcctggccagcacggtgaaaccccgtctgtactaaatatacaaaaattagccgggcgtggtggcacacacctgtaatcccacctactcgagaggctgaggcacgagaattgcttgaacctggaaggcagaggttgcagtgagctgagatcgtgccactgcacttcagcctgggcgacaagagcaaaattccatctcaaaaaaaaaacaaaacaaaacaggagatttcatcataaaaatctccatttctagcttctgtgggtgagtgatgacgtcagagcagcacagaggcaggtgtcagggagcctgtggactcttggccactgtgtcacctcacatggctcctggaagccaggcggacagtgatacgtccacagccacaccatccccatggtggtgggacagggttacctgccagtgcccactcttctcccacaggtgctgagaccacagcgctgttccacaaagccccaggaagccacattaccctgtccaccggcctctctagccccatcttgcccaggaagtgggaccttggcgtatcgctgtgaccacacctcccagccggtcagcctggccgctcaggctctacctgcaaaggcaaggccccacccaaccagcacccctctcatggctgggggtgcctccaggctgccctctctagggccaggagcctgcagaaacgctcccagccttgaataaagagcaacgaaattattgaaacaaaatcaataaaagtttgaatcagggatggtataacatgctctggctttgattctgtgctttaattcagcgttcctgaaaaacttatgatgtcagaaactatctgtaggtttggtttttttcattttgcaagaattcccaggatatggagaaatcacagccactcacagccttaacaggttctttgggcccaaatgattccaaaagcaaaacgagagaaactttttcaaatatgtttattatgtatattatatacaatatattaataaaacatattacctacatgcatttaaaacataactgaagtcagattggcccagaagactcactccaaatgagacctaatccccaatagggtgcaagtgactgcacaaactctactcctcacagcccttcctaagactcagtgtgctcatcacactagggtctcagagtccttctgaccataaacccaagccccagcgccagcccaacacacacttggacgcagcatgttcacgtccagcctaggaagaatttatggttgacctggattgggtaaaaaccgtaaacgtctgtacctcagaatgtaagatcatggtgtttaaaactacagaacattcagaggttgtcagaagtctctaattgctggtcccccaggttgaaaccagcccttaggttgaaattttgacctgcaaatttttttttaaatctgaaccaaattttttaaattaaacccctttaaggtagtacattttcaagatgcaaaattcaaaaaatataagagggcacgtgataatgagtgagtctcacttccaccccaccctccagcctcccagtttccctctccagaagccatgggtatggatgccaatctccaaaaatattttattcattacaagtatatacatatgcattattttaccgctcacaaatggtagcacactgcacggtttcccaataccttgttttttttccccttagcaagctgtctgggaaatacttctgtatctaaccacgggcaggggtgttcctccaagatttttagacaacagttctccagttcaccccgttccggtgaagggcagagcaccccccgcccttcccagccaccctgtacacgcccctactcgctctcggatgcctgcagttcccaggcttcccagcagagggagacaccattccactcccaagaccaccaaggggtcgtcccagacacaagcttcaagggtctagggaagagacgctatccgcccagacacaaagaccccccttagctatactgagttggcctccgggcctccccttcctgtttctatctcctcctggacctgttgcttagagccctaccccgaggtccccccgcccggcttccttatgggaactggccccgccttaagagtggtaggagggagccttacccttgtctaggacctgggcttgacaacttgccccagggaaccacatagagaaggggtgtagcgctgggcgaacattgccctccccgatccctcagcgatgacaagtggggggtccttctctctgcccccagcaggccagtttccggaagagccttgacccaaacccccttttcctgtcctgtgctccacactcccagcagctgcttctccctggccaggccctgcagccctcctccccgcccccacggtggtgttggggtcgcctggagtccagctggtgtccagggcagagctacccctttcctggccctacccctccccgtgaccccaatcctccgccaaccgctcaaaggatccttgttctccatccagcccccagacaaaagtccctctgtctaagaaggcggaattgaggggagggggcacccccaactgggaccatgggggagcctgcacagaccccatccggaaggaatgcctggaggaggaggagcaggagacaggggaggaaagggggagggaggcttgtacagtgctgggggccttatgtggactaggaggcagccgcccccaccagcacccactctgtagacccaggcgtctggctcccagcacccacggaaagagcctggctaggaaactgcagcctggtgcctggcagacagttctcattctccccagggcagggagcaggttatgaccaggactaaggtcccagagtccccaccctgacccctccctgctgttccagccgctccctcatatccacccctgccccatctcctgactttggtcacgctagcatcttctgctgatcctgaaattgtaccagcggcaagatgtggcctggaaggggactttaagttctccacaactgccagcaatccttccaccaggcaaaacacatcatctaaggaaaagaagtgaggtcggaacaccaacgcatcatctcactgcatggccctggaggctctgccgtttaaagaccccagaaccttccccattcaaggtcctctcctgggcacaggagattggagaaagctcctcccttaattccaggggccgagttccagcccatccaattctccgtctcacctgaggctgctgtggtcctggtgaccccagggagcaacctgccgcccatggctggggagggggtgaagctgtctctttaagagcaggaatggagcccctgggcctcagggcatctgacttgttttctacctgcccaggtttgcttagggcgtggcagcttcggataaacgcaggactccgcctggcagcccgatttctcccggaacctctgctcagcctggtgaaccacacaggtgagcagctggggccccttcctccaagccctccttgtctctgcccctaaattaggaagtatctacctgccccctgaccctgccccatagaagcttttatgttaaagcgcctaaaatcttgtgaaatgcttttctggagccaggagataaacggaagtcccttcccctaatgtccctttccccaccattctcctctcagggacttgttgaaccagctgaggtgagggcaggactgataagtgtggttggggtgtctgaaagactagtgtctgcatggattagggatatctgggttggggatagctgggtggaggagagggggtgcctgggtaggtaggggtatctaagtggaccaggggtgcgtagatggactggggacatctgggtggatgaggaatgctgggtggactcggggtgtccagacattgagggatctgggtggataaggagtgctgggtggactcggggtgtccagacattgagggatctggattctggagacctccaggaaaaaaggatggagctgctgggggaagctttaaatggggagttgcttgggagatttcaggagcacacagcgggcaggatctttctacccacccctgaacatgagaccattctcccatggtatggaggaatagaggggatagcagagggcaggtgggggaaacagtcctcaggccggccttgggacctcatggccaggaaggatgagagcaggtagacagagcatcagctgcagggctgccttcctctctaacctgctcaccaaccacatcagttcgggagcagcccacagcctcttcagacaacagcctgaatggggaacgtgagggcagacccagctcccggctccctgcagcctccggaagcatgggactggacgttgttttgcagaggctggggcgaggaggataccatctgtcagtcttggctggatgacatcatgggaagggggtatagtggggccttgcaggccagaggtggcttggaggagcccctggaaagaggcttaagaggtgagactcaacagccatggcgacagagcatagggctttaagatgaatttgcaggggttacaggattacaactgcaatgtgggctaataatagtgccccctgcattaagctgcagagattgagcgagtaagtgggaagctgagaaaatgcccccatggggtagacactcaataagcatctgctgttattaccaggactcgtatggtcatgggtgacagcttcagaccacaggcagtccacctacaacctgtgcccctatccaacatgccatcctgcccacccacccacgccagctcccccaacccccaacacttttggggatcctaaacacttcctgggcctcagtaatgctccccaaagcctcaggctttcttcccgcaaaaaaaggaaaagaaatggatgctccaactaaaattgtgagttcagcatgtggaattaactgggaagctgagaggattcccaggccctggggtgccaggcagagggaggagtctgtgccaacctgcaaggaccacccgcaccgttggttgcgggcaccaccctctctcagcatttttgctgttcgtgaaatgaggacatagtggacgacgtcggggattgctggggggttaagtgagtgagaacacggcaaggtcagtgtgcactccagggcaaggtggaggaagtgccagctctcgctatcaaaattataactaggccaggcgtggtggctcacacctgtaatcccagcactgagggaggccggggtgggtggatcacctgaggtcaggagttggagaccagcctggccaacacagtgaaaccctggctctaccaaaaatgcaaaaattagccgagactggtggcacacgcctgtagtctcagctactcaggaggctgaggcaggagaatcacttgaacccaggaggcagaggttgcagtgagctgagattatgccattgcactccagcctgggtgacagagtgaaactccgcctcaaaaaaaaaaaaaaaaaaaacaattatgataactatgcactcagcatttgggcagggacagggcagggacagggcaggggagggcatgctcggaggccagggcttggtgcagccttgcaggctggtgagagggcaggactgatgccaggtcaggaaggagagagaaacgagttccttatgctgagcaggtctacctgggaaagagaaagtgtttgctgtcaccaggaactctgctgggcctagggtagggtcaggggctgggctggggaccccggctaggcagagccagggctgggaccgggaagggcatgggtgtgggatgaggggcaggaggttcgggggaacagagatggagctagggctgcagccaggaggtagagtccccctctacccccagtcccagcctcacgtcaattcctccacacaccaccccacccccaagcagcttgaagaacctgctcagtcctcagcctgaagtctgcaatgtcctggcagggccgggcaggctctgagcggtctacggagacactcctgggaagcgggcctcctgccgcctggctcccaatgccccgcttccccaaacaccccaaggccctgacagtccctagttaggagcagctgctggggagccaggcctggcttaaatcctacttcctggctagagcacctagtttcacctctcagagcctcagtctccccatctgtccagtgaggacaacagcgggcagtggcgcccttgtttggttgcggggcgattcccagaaagcctgaagtccatgtccagtgagttattatggctcctcccgcctcaggcccgagtttcacccagtccccactccacggtgcagctgcggcttatctctcagcccagcgagatgccagccttcctgtcccgggtgagctgcgcaccctgcctggggagcaggggaggagggttggggagccacaggcacagggccagcctcccggtggctctgctaaggccagacctcccgccacccctctaggccagcgctctgacatgcagaaggtgaccctgggcctgcttgtgttcctggcaggtgagtacccatcccccgtctgccttttcctctggatcccctggatgcggggatccaacctctgtctctctcctgtgcttttctacctccccgggaaggtggtaaatgttagaacagcatctccctgagggtaagaaaagtcagactagtgatagccggggatacacgagaagagctggctcacacagctggaaagtcaccgtcttccccattctctcgatctcttctttttttttggctttttttgtttttgtttttgtttttgtttttgtttttgaaagggagtctctgttgctcaggctggagtgcaatggcgcaatcacagttcactacagccttgaactcctggggtcaagcgatcctactctcttagcctcctacacagctagaatgccaggcacacgccaccatgcccagtgcatttttgattttttgcagagacgaggtctcactgtgttgcccaagctggtctcaaactcctggctgagtttgatcctcccacctcagccttccaaagtgctgggattacaggcatgagccacactgcactggccttgattgactattaaacagaaataacggaagctagagaagatgatgaaatgacaccttcaaagcactgaaagaagataactgccctgccagttctctaaaaacttcaagtagaaggctcagctcagtgcgactgcatctttaacttccaaacacttttcccttttttcttttcttttttttttttcggagacagagtctcgctctgttgcccaggctggagtgcagtggcatgatctcggctcactgcaacctccacctcccaggttcaagcgactctcctgcctcagcctcccaagtagctggcattacaggcgtgtgctgccatgcctggctaacttttgtatttttagaagagacaaggtttcaccatattggccaggctggtctcgaactcctgacctcaagtgatcctcctgcctcggccttccaaagttttgggattacaggcctaagccactgtgcccagcccgctttttactttttcactgcagccttgacctcccaggctcaagagatccttccacgtcagcctcccaaagctctgggattacaggcacactttttgtccattacatagggcaagaccagtattccctgcagggtagtgatctaaaattacattttcaataaagtctatttaagtgtataatagtgagtcattttcaatgatgtgcaaacaccagaccaggtgggtgtggacatggtggaagcgggaggatgggctttgagcatgattggacttggggaaacaggaatctgggaactgaaaccatctgtcgtcttgaccagaaaagtcccccgctgctgcaggaggcatggattaaccacgtgtctggaaacatgagaccaaatagtggctaaaaacctcctagattagaacccatttcaggtggcagaatgctggcgtgactcggaggtgtggggctgagtgggcgagtccacatttcctcgttgggatatgaggggatgaggtggctgctcagtgacaggacccctgtcccgcaggagaccctttcccaaggcccctgaaactccccaggccctgcccaaaggcttggctgaggccggcatcaccatctcccctccttcccctcttctcccactaggctttcctgtcctggacgccaatgacctagaaggtgagtcagactggactctcacccgtcacacccccaaattctcccctgggtggggaaggcctgcatcctggctgtaatcctggattcatgatcttttttctttccttgcagataaaaacagtcctttctactatggtgagagcccgtgccccctttcccctccccacaaccccacatactgcttggtgccaagggttcccatacagggttggggcctgacgtgagcatcacaggacaaagatacgaagggactaggatggggttactgaatatgccacacagtggattaaaggaactagaggcagcaacctggcctttgggaaggttctattccagcaagatagacacacgcaggaggtgaggacagtttgcaagaagccattggttggttcagatcaactgctgggagaagtgttgacttgagaaaacttcctggaggtggtgagctattggatcaaaaccctcatctggcctccaggttccaatgacctgctccctactccccgctctgccctcacctctccacgctcctcattccttctgctccaagcctctcagacacagcagacatactgccagcctcagacctctgcacctgctggttcctctgcctggaacacttccttccacagaaccacatggctccctcccttccctctgctcaaatgcagccccctgagaggccttccctgacaactccctctaaaagagctgccatctgactttttttttgttttagagacagcgtctcacactgttgcccaagctggagtgctgtggtgtaatcatagctcactgcagcctcaaactcctggtctcaagcgatcctcctgcctcagcctcctgaatagctgggactgcaggcatacaccaccatgcctggctaatttttgtatactttgtagagatgggttctcactatgttgctcaagctggtctagaactcctgaactcctgaagtcccaaagcactgggattatattaggttggttcaaaagtaattgtggtttttgcaactgcttttaatggcaaaaatgcaattttttttttttgaggcagaattttgctctttcacccagagtgtgactggctggagtgcaatggtgcaatcttggctcactgcaacctctgcctcccgggttcaaatgattctccagcctcagcctgctgagtagctgggattacaggcgcctaccaccatgcctggctaatttttgtatttttagtaaagacggggtttcaccatgttggccaggctggtctggaactcctgacctcaggtgatccgcccaccttggcctcccaaagtgctgggatatcaggcgtgagccaccatgtctagccaaaaacgcaatcacttttgctccaacctaataggtgtcagccactatgcccagcccgccctctgactttccatctcccaccccacttatttttcttcaaaccacttatctctgcctgaccctgcacgacagatcgtgtttgctggtgtgtgaaccagaatgtgagcacctgggattttgtctgttttcttatggcggtgtccccagcaccctgtgcatcctaggtgctccatatatatttgtcaagagaatggggggacagatggagaggacacaggctggcactgaggtcccctccactttcctcctagactggcacagcctccaggttggcgggctcatctgcgctggggttctgtgcgccatgggcatcatcatcgtcatgagtgagtggaggagctcgggggagcaggcgggccggggctggggctcccctcccctgaccactcagctctccccaacaggtgcaaaatgcaaatgcaagtttggccagaagtccgggtaagatactgttccggcatgcccgcctcaggctgactggacgcttttcagggtgaaagggctaactctcccagcaggagaggcctcggggctctgccctttagagttcctgccgctaagatttccaggtttattgtttctagctggtaatccccagggggccccaaatcctgaaatgctttggcccctgggattgcacaaccccccaaatggaaaggcagccaggaagacatgtctgggcaggctaagaaccctctatccggagggagagggcaaatgggggcggacaccaatctcaccacttttgtctccttagtcaccatccaggggagactccacctctcatcaccccaggtaagatggggcagcatggggctcaggggaacacggaagtggtgtgtgtgtgtgtgtgtatgtgtgtgtttgcacactggaaagaaaagaactcaatccaccctcacaaacggaccccatcacttcccgcaggctcagcccaaagctgatgaggacagaccagctgaaattgggtggaggaccgttctctgtccccaggtcctgtctctgcacagaaacttgaactccaggatggaattcttcctcctctgctgggactcctttgcatggcagggcctcatctcacctctcgcaagagggtctctttgttcaattttttttaatctaaaatgattgtgcctctgcccaagcagcctggagacttcctatgtgtgcattggggtggggcttggggcaccatgagaaggttggcgtgccctggaggctgacacagaggctggcactgagcctgcttgttgggaaaagcccacaggcctgttcccttgtggcttgggacatggcacaggcccgccctctgcctcctcagccatgggaacctcatatgcaatttgggatttactagtagccaaaaggaatgaaagagagctctaaccagatggaacactggaacattccagtggaccctggaccattccaggaaaactgggacataggatcgtcccgctatgatggaagtgttcagacagtttataatagtaagcccctgtgaccctctcacttaccccgagacctcactttattacaagatctttccaaatacccaaatgtccctgcaagcccgttaaataattccctatgctacccttaataacatacaatgaccacatagtgtgagaacttccaacaagcctcaaagtcccttgagactccccaatacctaataaggcatgcgaaatgttctcatgaactaccccacaacacgcctaaaactcaaaacacccaaaaatatctcctccaatgtcctgaaacatgaacccaaaaagagacccacaataaactcgtgacttgtcccctcatcatgccgttttatccctcaaacatcccctgagtccctccataaccacgaacccacactcagagaccatgaactgcggaaacgcctccctgggacctgggccgctccgagcactgctccagggacaccatccccgccctgtgccgttcacaggacatcctctcccaaggatccacaacactgggcggggagggtgcacagcgcatttattgagctcggactcgtcttgtccttgcctccgtcgcccatctagaagggcaccaggctccccgcgacacctcccgctgtccctccctgtgccccggcgcacgcgcaagaggcgcaaaaggcacagcttgctgggcggccgcacgcatgcgcacaagcagcagaggggaacccgcccagtgctgagttgtcttcgaggttggcgctcctccaggaaagcgattggctgcgtggagtttagaatgggaaaggaatgccatcaacccctcggtgctttcagagggaccagcggggtaggagcgggttgagaggggggctccgggacctcatggagctctgcacgtgacctccacctcgactccatgcagtgcaccagcctgcaccccccaggttgcctttgatggggaatctgccccagccgagatgtccagatgttgctttagacctgaagggcagctcgggaggtccagtaggctgggaccctctatgtccccccatgggtgcagatcctttaagaagtgggcttaaggcctagacgtgtggctgatgaacgtggcccacggtcagcagctcacaggcgggccatcaccccaagtagggccaggagccagccaaggggccgtccaggggccccagccatgcccagagtcccgttggtggtctcaggcactgaggtcgatctcgtgatgctggtagatctgtgtggggcccttaaagcaagcagcaaagaggaagcgtctgccggccatagtgatgtgggcaaaggcacggggggccaccagggccggaggccccagctcctgcagtggctccaggagccccttgtcaggctcaaggcggaggacctggctgaaggcgaagtcgctgcctaggatggccagctggtccctggcgatgagcagtggctggaagacgtgggcaccgcgcgagggaagttgctgcagcagacgaaacatggagccgtcccagcgcatgacctgtgggggtgtggccagtgagggcctggggtcccgggggtctctgggggccgtggaacagcttggaagcagaagcctgtcggtcccaaaactcccatagctttcttatcttcataaaagtcaccacccacctgttcggccacacacatgcagttgttctgagcccttcccttgccctcacgccccacacagaagcactcagccatggactctgtcagtttcaccttctacagttgtacatttctcccaccacctctggctgaactccatcccctcctgactggaccatcctggcagcctcttccctggcctctaggctcctctccctgctcccccagtctgttccccacccagagaccttgtgaacacctgagtcagatcagggcccttccagactcagaaccctcccctgcctgcacctcactccagaaacagtgggcagtgcttaaccctagcatcagccttgggggctcagtgtcagggtggggacaggtgtggctgtggtgaagtctggaatgcatccgagtcacagagccagcatttgggggtagaatcaggatgttggggccagcatcagtgtcggggactggggagtggttcggagtcagccagccttgagggggtcagagtcttggcatcagtgtggggtggggtcctggttcaaaggtcggcatgtgagggtaggtcagagtttagaggcttagtgtgcaagattgggtcagtgctgaaaagccagccccccgcccccaggcccagcctcaccatggagtccccaatgtagcgtgtgaggcacaggaacacgtccccaccagcctggaagtggcgtgtggcatagacatcctcggcctcggggatgtctgtgcgtctctcgaagcggccaccggtccagtggaagagcacgggccgctgggaagccgaggccagcagcaggtggggccggccgtccagctccagggcctcagcgtccgtgtcccggtgccaggcgtgcaggctctggtgcgggtaaaagccgggcccgtcgcggcacagcagcgtggtgctgcccgccttggaggcatcggccaccacgaagcagggttgcccttccagccacaggagctcggcgtcattgggccgcagcagccgccgcggggccagggtctgcgttggggccaggcgcaggccgggactgggccgggcccacagctgtgagcccccccacaggcgggcagccagcacgaagaggctcgggcccagcaccagtggcttgcaggacaccacggaggccgctgtggggaggtggggaggcaggtcaggccagccaggcaggctgctggacaggcagaaggacggggagggggctcaccgggcagctcttcctcgggccggaagcgctgcaggctgtagtcccaggagagaatcaggcagcggccggcgaagggctgtgccagcacaatgtgaggctccccttggtaggagaagggctctacgctcagtgccgactcccccaccgtctggaaccaggacagctctgtgggtggagaagagagtcaggcaggccccaggacccccagggtcctcattgctgagcctcagtttgcctacatctctgaaatggaggccattcatggtacccccctcatagggacatataactggaatcttgatctgtagatgtttgtttggtttgggtcgaggggtattttgttttgttttgagacagggtcccactgtgtctcccaggctgaagtgcagtggcacaatcatagctcaatgcagcctccaccttctaggctcaagcaatcctccttcctcagcctcttaagctgagactacaggtgtgtgctaccatggctggctatttttttattttttgcagagatggagtcttgctatgttgcccaggttggtctggaattcctaggctcaagagatcctcctgccttgacctcccaaagtgctgggattacagacatgagccacctccacctcctgggttcaaacaattctacttcctcagcctcccgagtagctggaattacaggcgcccgctaccacgcccagctaatttttgtatttttagtagagatggggtttcaccatgttggccaggcttgtctcgaactcctgacctcataatctgcccgcctcggcctcccaaagtgctgggattacaagcgtgaggcaccgtgcccggcccataaatcttattttctaagctgtgtggcatcaccaaataatcccttagaaacagcatctggattaattcatttaacttcacaacatccctgtgaggtacattctgtgatgatttccccttcgcagatgagaaaacaaaggctaactggcacaggcagtctgttatccaacaaaatccatccttcccaccttccaggagagaggattggagctggtcaccaggccacccagctagaggctgcattatcccgggacccccattcaccgccctcgctgaaagttagatgtggctgttttgagactgagtaaccagtggaacaagggcagatgtgatgagtgtaatgagccaccacacctggaaacagcttgtcccaacttggtctcctttcccaccacgtgggtgtgccacaacctggtttcaagcctgaaagcaaggacaatgcccagggactgccccacgtacctggacagctcactccagatccttctatccttaattcatggtattttgagagtttgtgacagcggcttggctttcattgtcactggggcaccaaggctgctccgcttgttagtaggggagctgggcagttgactccaggctgtaatatttcactctgcgtgccaggccctgtttccaggtgccagcgttgaagcaatgagccaaactacatataatgcccacctaaagggcgaatcttttttaaatggctatcaaatcacctcttgctcaaaactctcagccgagagtggtggctcacgcctgtaatccccacattttgggaagccaaggcagatggatcagtagagcccaggagttcgagagcagcctggacaacatggtgaaaaccccatctctacaaaaaatacaaaaaattagcaggcatggtggtggtgcacctgtagccccagctaccagggaggctggggcaggaggatcacctgagcctggggaggtcaaggcctcagtgagccgtgattgtaccactgaactccagcctgggcgacagagtgagatcctgtttcaaataaacaaacaaacatacaaaaaactttctattcttgccatggcccagaataaagtctcctctcctctctgtggcttccaaaatccatacctgtccctccactcactacccctgagccacacctgccttcgtttgatcttcaaacagggcacactgtatgctgcctcagggccaccggccaggctgttccctctctctgaagagcccttccctctgttcctcacttagccacatcgagacctaacatccccacttgagagaagccttctctgactcccataggaaccctcattctctcatcactccttgtagttatcacaacgtatagcacacattgatctgtgccgtgtttgttaaatgtccatctccccaaactcccaggactgtaagtcccgtaaggccacggctcaggtcgcaaccacagtgaccatcacctctcacagggctgggcactgagtggacttcagtgaacatttgttggataacttgaatgaagagggactccctaagttaaatccccttcttctatgtgtcccacagaccaaaaacatgtctttcttacacttagaataataataattatatgctgataataattatgtatgcatatataattatatatatattatatatacatgttgtgggggaaaggaagagagatcagactgttactgtgtctatgcagaaaaaggaagacataagaaactccattttgatttgtactaagaaaaattcttctgctttgagatgctgttaatttatgaacttagccccaaccctgtgctcacagaaacatgtgctatattgactcatggtttaatgaatttagggctatgcaggacgtgctttgttaaaatgtgtttgcaggcagtatgcttggtaaaagtcattgccattctccattctcgattagccggggacacaatgcactgtggaaggccgcagggacctctgcccaagaaagcctgggtattgtccaaggtttccctgcactgagacagcctaagatatggcctcgtgggaagggaaagaccttactgtcccccagcccgacacctgtaaaggatctgtgctgaggagtattggtgaaagaggaaggtctctttgcagttgagattagaggaaggcatctgtctcctgctcgtccctgggaacggaatgtctcggtgtaaaacccgatcgtacattctgtttactgagatagaaaaccgccttatggctggaggtgagacatgctggcggcaatactgctcagctactctttactgcactgagatgtttgtgtaaagttaaacataaatctggcctacgtgcacatccaggcacagtacctttccttaaacttatttatgacacagagtcctttgctcacatgttttcctgctgaccctctccccaccattaccctatagtcctgccacatccccctcgctgagatagtacagatagtgatcaataaatactgagagaactcagggaccagtgccggcgcgggtcctcacttgctgagtgccagtcccctgggcccacttttcttcctctatactttgtctgtgtgtcttatttcttttctcagtctctcttctccaccttgcgagaaatacccacaggtgtggaggggcaggtccccttcatattgttatagataataataattattgctgttgttattgtattcatagcatctgtggccgggtgtggtggcacatgcttgtaatcccagcactttgggaggctgaggtaggaagatcacttgaagccagaagttcaagaccagcctaggcaacgtagcatctcccagaccctatctctacaaaaaagttttttaaaaaaattagccaggcacagtaacatatgcctgtagtcccagctatttgtcaggcttaggcaggaggatctcttgagcacaggagtttgaggctgcagtgagctatgatggcgccattgcactccagcctgggcaagagaatgagaccccaactcttagaaaagaagagcatctgtgtaaagacccttcaggcttaaactccttcaggaagcccttcctgtccccccagctctgtgtggccctggccctgactctgggctccctcagctcccacagctttccccatccctgccctgacccctctggctgggcctccccatcctgcccagatcgtcctgggctgtcctgtctgggcctgcattcctctggactttgaactctttgagggcgagacccagggctggcctcatcattctgtgctctctgcactgcccagtatcctaaaaggcaacaaaatctatttatagaaaaggcgagtcaatgtaaaggaggtgacattgcacctgcagttcttagcgcaatacttggcacttaacgaagaatttttaaattggttgcttttatgttaacaagggtgaacgtttataaggacctcctgtcccaggcccggcgccaaatgccgaacacgtgaagatgtatcattgaattcccatggcactcctatatcactgtttattacccccactttacagatgagaaaactggggctcaggaaggcagtgctgcttgctcagggtcttcccactccgggaaatggcagggcagggagtgagacgagcctcttggccctggcagcctttcccccagatctcccgcctcccaccccatcgggaaagccccccacctatggctctgcacttgaaagtcttggggtcgaggtggtggagctgcatgtggctcagggaggcggggcccgcacaggcgccggtccccacgctggcattcacggtgggcatccactgcaggagccagaggacgcggcagtcacactggaacgggttcccgcggaggtccctggggcaagaggccagggaggggctgcgacccggcttccacgccctgggggccatgctcctgcccccacctcaggcaagtgtccccagagatggggccccatagtggtaagaaaaatacgtaagaaccactgcagccaaatgcatgcacgccaaccagaagtgggcacggatgccccccgccgacacaaacattccccaaccccccacattcccagcccccatgagcctcacacatgagtaagggtgtccaggcctcggaacaggaatctggggagggtctccagatggttattggccaggcttctggtggaggaagagaaggcaccgtcagcagccacaaggataccctgtgttccctggggggtggagcatgggtgcctctcatggagggctggggcggtggaggcacgcacaggtgtgtaagcgagcgaagtcctctgagggcattcttagagatggagccaatctcattgtcctcgatgaagctgtggagggaagctggggtcagggggaggcccgctgagcttcagggaacgcaccccatgaaagacataggcccactggaaggtgctgaattctcttccaataccacggacaatcccagggaaagcctctcaaaaacctctcctcccaaagtcccagccatcaattctaggagccatgaaactggccccatagtcattgccagtttcactgtgaacattgtcctgctgccaccaccacaatcaccatcaccagtgctgacacccaaatcaccaatacctccagcatcattggtaatgaccaacaccaatgccagcatccccaacacccatgtctttatcactgtcatcaaccccaggaccaataactgccattatccccaacaccataccctgccaccaccatcaccaccaccagtgctagcacccacaccaccacattacctccagcatcatctgtaatgaccaacccaatgccagcatccccaacacccatgtctgttaccatcatcaaccccaagaccaataactgctgttatccccaacattataccttgccactatcatcaccaacactagcatcattgtcaccaataacatcaccacccactcccatcaacaccatcaccaatatcatcattaccaaactccacaccaacaacactaataatcatcaccaacaacacaatcttcatgatcaacaccaaaaagattgccacccgcatctccaatgcagcactatcacacacatcagcatgagcgccaccaacactgccaacactcacatctccattatgcccaagatgcacatattcacccaccaccagtactaccactgccggagtttccataaataccaacaccttcaccatcatcaccaacccagtaccaacaacattgccattcataccaaccccaacatcctacccacagccatcaccaacatcaacaccaatactgtaatgacccacccccacaacattgataattatcacagacacgagccccaagaacttcatcagtgatttcatccatagcatcatcaccactggggctaccatttttaccaacatcatccccactccatcatcatcaataatgccaccaatcccatgtcagcagcagcaacagggtcatcaccactgccattatcatcaacgccatgacccacaccaatgccagcattgtcatgctgtgactgccaccgctgccaccatcaccaccactacccaatcgtcagcaccaccctcaacaccaccacagtatcaccaccactacctaattcagagttgtttcctggtcatttgaaacgtttcttgtctctgacttctgtacacccttcctgggtttctatgagtcagggagagccagaatcaggctctggttatccgggccctttgtagatcttgaagcagagaagtgaggtgataatcaacactgataaacatcattgacaccagccctgagaacttcatcagtatcacccaaagcatcatcaccattgggttcgccatttttatcaacaccatcccaccatgatgtccaaacacctgctcctcagggccacagctcccatctccccctactctgggagccacagaagggtccctccttgcccagacccacctgcctccatcccctggcctcactcacaggtactgcaggtgggacaggcccgcaaatgcatcgtcctcaatcacggagaaggagttggaggtgaagaggctggcaagggggcaagaaagaaatttttccagaattgcagcccccatctgacattttaaccctggcctccaccctcagcctaggtgggcatgggcacgcaggtgtgagtatgtgcatggacacaaatgcttttgtacagacgtgtgcatacacccccacacacgtgcatcaatgcccacctgacatctgtgtgagcatacactcccacacatgtgcataaacgcacactcccttgagctggttgtcggcccagccaggccccactcacagcaggtgcagagacggaattctcaggaagctgccggccttcagctgggtgactcccgtcctgacgagtgagctggggatgtgggcagtggtaggtgagagggacaccacagcaatactccagttgcaaaccagaaccttctgccatccgggagaccccagcgtgccaccctgaccctggatgtgtctcccctgcatgccagaggaggcaggcatttgccctcctggcttgacaaggaccctgacagcactcaaccctcctcctgggccccaaatgctgtccctgccctctggggtttccttctgctccttcccagatgccagcacccctcttcaaggcatcccgacaggctttgctgcccatctcctgagatcctgatgggcccctgtttccctggagacccggcaccacatcccaacctctggggtcccaggacttccgtccccaccttcgggcatgcagaaggctggacactcacagtgacagcagggtcggagagaagctgacgggcaggtccggggagccctcacacagggcgctgtctttagagcaggagcagcgcaggggacactttccctttgggggtctccaggccaccaccacccccgccccagccagcagcagcagcagaatgcctgcccctcccatgcccccacccccactctgaggcacccgcttctcccggcccacccagctcagcccaggccactacgtctcctcctccaccaggccgccctccatccgcctgctggcacgctcggccctggcttctctctcctcttctccgtctttctttcagtcggccttcctccctgttcgtatgtctttggtgtctaattttctgtttctctttctccctgtctttctgtctctgtatttttgactctgtgtgttagtctgtttctatttctgtctttgtctctctttctgcctgtttctttttttctgtgttgctgtcagtctttcaggctttaggtagctgtctatctgttggtctctatgtgtgtgagtgtatgtgagtgtgtgtgtgtcctgctgcctggtgtcttgatttcttgtctcctgccccccccacccccccttccagctccctgcctgtagtttctttgcctcctcccacctcccttctccccgaaggtttgggaaaggggttcgctggacacccggcacacccggcagagtaggatgggaaggaggagggggtcagaggccatgagaaggtcggccttgggggaagggactggacagccccacaggagggggaggggccaccaagggctggagccgccccaccactcccgccagccccctccccagattccccactcaaccctattgggggagcaggaggacgatgtcaccagggtggggaccagatggctctgcattctggagcagggtgggaggagaggccctgggggggctggggacatcccgtcctggccactctctgccagccccctcccctggctacaggagggtgtgttgggcgctgtcagtggggccagatcacgtccagctgctccctctggtggtcatactcggcaggacctctgcccggccccaagcccttagcctccctcccctaccctgaaattaaccctctagtggccaacacccactgggggacagcaccaacccgaggacatgatgatgatgaagatgatgatgatggtgaagatgatgatgatgatgccaccccttcttcagcgtctactctgagcctggccttgtcctaaaagctcatctattaactcattctgatcttgccaaagccctctgaagttagtgctgtcatcatcaccactttacagctggaggaagtggagacagaggtcagggaacctgaactctaggttacccagctgagggcacagccgggattcaaacccaggcatccggctccaggttattttgcattctttctttggagatcagagttcatggatagatggataattggttgttttaatctggactaaattttagtcatttggatagattctgtccactaaataagaaacataagtaaatgacacttgttagctaagatgaaatagtagtaatgtttatactcactcagccttcacagccaccctgtgagatgggcagtactgctatccctgctttacagatggggaaactgaggcacagggaagttatgtgattagtttcctggctctagtcagctctaaacctaacccctaggctgtaccacctcatcgcctggggacgagactcatcctgtgattgaggaatgcatgcagcctctcttgacactgacgcccacgcccagaagcctcgttggaggataagggggcttaacagcttggaggtcatgcagatctgggttccaggcccagtcctgtgtggcctcagttttcccatctgtcaaacggggacaatcgtggcacccgcttcccagttgtggagaggactcaggtgatggaggcaactcatccttttggggttcagcacaaggtgggcatcccacagtggtcggcaagcttgggggtgggctccggatccagctcctagaggagcagaccccagcagcttgtggtttgagccatgcccgtcagctctcagtttccttcactgactattgggtatgataaacagggtccctgaaagtgaagttggagagctgagtgccaggggcacagagggatctgaacccactctcatagggtgcccagcccagcagtccagttcacaaggaggaggatgacaaggacaataataataggccaggcacggtggctcatttctgtaatcccacattttggcaggctgaagtgggaggatcgcttggggccaggagttcaagacaagcctgggcaacatagagaaaccccgactgtacaaaaaattaaaaaattagccaggcatggtgtcgcacgcccatagtcccagctactcaggaagctgaggtgggagaatcacttgagcccatgaggttgaggctacagtgagctatgattgtgccattgcacttcagcctgggtgacagagcaagacccggtctcaaacaaacaaacaaaaaatgaagttaatcataagacaatgtcaagttcagagacctctgagccctgtccaggattatacacgtgatcttagtgatttttccattttggagcatgtgaaaatgaggcacagagctgctcaagttcacacaaccaggagtgcagtgcctgggccattccaggtttccctgtcaccaggacctgtaaacctggcctgcccatggggacgccaggtgtgttgtccccgacaagagctcaggggaaggaaagtgtggggttaaatacatatctgtggttttggaatgtgtgaacatgcaagtgtgtcagcctgcgcatctgtcaccgtggccaaccatgtgcctgtttgctcaagcatagggtgtgaaccagtgtgtgtgtttctgcttttgtgggtatgtgtgagagcggcgggttgtccttgatggtgtttctgcttgtgtatctgtgcccatggaaatctgtctgtgtgtacacaagcttgttggccttcctatctttgggaccatgtaggagtgctggctgcatgtctgtacctttggggtttttttgttttgtttttgtttttgagacagagtctcgctctgttgcccaggctagagtgcagtggcatgatctcagctcactgcaagctctgcctcccgggctcaagtgactctcctgcctcagcctccggagtagccgtgattacaggcgcacgccaccacacccagctaatttttgtatatttttttagtagagacgagctctcgtcgggttggccaggctggtgttgaactcctggcctcaagtgatcctcccgccttggcctcccaaagtgctgggagtacaggtgtgagccaccgtacctggccatgtttggccatgcatcttagaatgcatttatgtgcggtgtgcacatacttgtgtgtttctgtatggccatttgtgggtgggtcttcacataaacatgcatttttgtggccagtttgtgagtgtagatggtgatgtggctatgtctttgactgtatctctgtgtggccatccatctacatgagcgtgcgtgggtctgtgtagacataaatgtgcttgttctggtattttgtgactggcataaaaggtgttggctgtgtgtccgggtctttgggtttctctatcagtgtgtcattctgtgtgtgtctgcttctatggatgtacatacatacatggttttgtctggttttgtacctgtatatctgggtctttgggattgtgtgtgggtgtgtgtgtgtggtgcatttctggggatctcaccacagcagatagcgcacatgcgcgcgcacacacacacacacacacacacctccctcccgtcctctaaaacagccctgttaaggacctcacggagcactgggatcgggggtcagtgggctcctgggcagtcaggctgggtgaccttcggccctggctggacccagttcccagggggcagccgcctcagcccaaaagctcttggaggcgtgtgtgtttgtgtgtgtgtgtgttcacaaccctgtcctccacaatcctcctagcctctccagcctgcctgctggctgcctgctgctgctctctctgaactgagagagttaaccaagcgggccagggcagtctgggctgggggccgccccctggcccccctccagccccagctccagtttcagctgctggttggggagggcatgggtggggtggggctgggaggggaggctgctgggggcggcgcgtccagctctgggccagggggtccaaagtgctcagcccccggggcacagcaggacgtttgggggccttctttcagcaggggacagcccgattggggtgagcgtcccccactccttccctccaggcctcacccctggtctggctgggccgcctattttgggagcaggagtggccagcccgaggcttcccaggcaggccaacccaagagggagggagtgtggttgaggcagtgggttctgcagggtgggatgtgggtgactcctccctgccctgctggtgcgtgtgcaccctggcagggtgtggagttgggacacacacgtgtgtagggctggttgcgtcactgcgtgggggcaccggaggcccagaggaggagtattggatgcctgacggtgtttacaccccacgtcctgctccaaccagcagtttggggagaggttgttgttcatgtccattccggccccactgtgtgtgtgtgtgtgtgtgtgtgtgtgtgtgtgtgtgtgtatccctgccccagcatgtgttttctatctctaaggcccactgggctgggcctcatgtcacttgcctgacatccgattgtgaaagatgtcacccagaggcgggcagaggggctgtcttttccttttctcgttgctgcccagggaggagacggggtgacctttcccacaggggcagcctgtggcgatgtggcagctgggcctcaccccggcagggctgtgcgtgaccccctgagtgggggaaggcaggctgttgccatggtggcctgagcgagcagaattcctccagggtgaagtgggagatatttatacccggggtcaggccgcgagcgggcgggcggagagggcagggagctgggatttcgcggggcacagtgaggccgggcatgtaggcaggtgggacttgggcgtgccctgctgtctcctgctctgtgtttgtgtgaggcagcgcctcctctgccctgccagggtaggtctgggaatcgggggcctgctgcgggaggtggaggcccaagggaggccccccggggactgtgtgtctcacccccgtccctgctacgttgtgttgttgtgtgatcccatcgtggaggttgttttggtgacactgtgtccccacgaagctggggatacccgtttctctagcttggagccaccaagatagaggacaaacacttctgtgattcagtccccagactgtctctgacttaatcccttgggttcaagccctatgtgggagagcaagggcacacactgcctaatccgtggtgtcccccccaggacaatggcgtctcttggccacatcttggttttctgtgtgggtctcctcaccatggccaaggcaggtgagtgcaggggaggctgcccgctacccacctcagccccaggggtggcggtggggaccgaagaaccaagttggagaccccaacctagactaagtcggctggggtaccaagaagtttgggggtctccacgtggggtccagtcacaggctggtatttgggggaggggagaggaagccccagatcaggcaaagatggggtgggatggggctgaatccccgatgggataactgggtcacagacagcctgccgtgagtcagggagctggggcagttaggtgccacctgccccatctgggacagtgcagagggggcagctgggacccagagagtgtgggcagcctgcccagacaccctcagactctaagcccagcaaggcagagcctccagtggtctcctcatgcccctccctgccaggaccccaggaagcattcaacccctgatttctctctctttccagaaagtccaaaggaacacgacccgttcacttacggtgagcggggggtctaattttgagtcctgggggagagcctggctttgctggtcctttgattccccctcgccctcccccagagtcccagtattgatatctctgtcattctccttccctctattttgtccttcctctctgattccacctgtctgcatcttttcctgtctgtgtctatctgtgtcactgtctatgtgatacctctctggttctctttctcttgcctgcgtctgtctcagcatctcgtggcccatcctctgcttcttcccgtcttctctcccccctgtcctcctcctccctgtcccctccctccctttcctatacacccctttcctctccctggtaccccactttcctcctcccatatctgctcccccttaattatcttacttccccccttctgcctgctggtcctttctccctgttccctccttcccaatttacccctctcctattctccctcctgtcttccctgccctcaccttccctgctctgctgctcacagactaccagtccctgcagatcggaggcctcgtcatcgccgggatcctcttcatcctgggcatcctcatcgtgctgagtgagtgcccctagctcccgccctctaccccgcctctccctggccccacctctctctggccccgcctctccctggccccgcctctccctagcccccctctccctggccccgcttctccctggtcccgcccctccctggccccgccccgccccaacccctcccaggccttgccccgcctaccctgccttggttccccggcccccggtctcgcctctagccccgccccgtcccccaagccccgcccctcgcgagggcgagctggagctacagcgccgcttggcgcccgccgggagggagcctcagcttctcctacctctccacgcccacaggcagaagatgccggtgcaagttcaaccagcagcagaggtaagacgcccctccccgccctccttcgcccgctcctgctctggagggcgccgcgggtgaggcggggagtacccctgacccgcagcccgatccccgtcagcgactatgtattaagcacctactatgtgccatggcccaagcctggccctgggaccaagcgaggaaaaaacctcccgcccttcctggccgagctcccagcctagtggaggcggtggccgtgggttccaacagccccacagatagaaaaatcacaaagcgtgataacacaaagtgcaggaaagaagaaacggcggtgaaatgagatcatctcacacgcggcccagtttagcttagagtcttgttcctagctctttgattcctcttcgaataaaatgttaaagcatggacaatgtatgaatatgttagaacaattatagatattatcataagtagtagctaatatttactgggtgtgtaccacgtgttagatacggtttcacttcctctgggagggaggtgctgttattaaccccatttgacagatgaggaaactaaggcacagggaggtaaagtcactttgttcaagatcactcaagtggaagatggggggttctgggtttccaacccaggccatctcatggcagtctgccaagtccccatgactatccctcccccaccaacttcacatccctgcccccaaatccgcggaggtactcactgttaaccagcttagaagccccctgccagcacataagctgctcctgggtgctcctcatttctggcggaccccgagcctgctcttcgtccatatctgggcctagttacaccaatctgggaaaggaggcttgtactggggggttcctagaagggcagcctctccccctttccatcccgaaatccctctgcctctgtcttcccaggactggggaacccgatgaagaggagggaactttccgcagctccatccgccgtgagtctggggagactgcgggtattctggggagagggctggttccaaggaccgcttttcccggccctccctggctgcgtagagggaagggctggatctgaaagcggagggcggggagttgccccgccgcgggccccacctgcccaggagctggggatgcctctccagaatgacccccgatctccgtgttccccccaggtctgtccacccgcaggcggtagaaacacctggagcgatggaatccggccaggtgctgcagctctgacacggcggtgggagggaaggagggaggaaggaaaggcgggagagggagggggccaagtgccagagttgaagggcggcgaggggtggggctggacgtcccccctcgcctctcacccttttcaccctcacaggactcccctggcacctgacatctcccacgctccacctgcgcgcccaccgccccctccgccgccccttccccagccctgcccccgcagactccccctgccgccaagacttccaataaaacgtgcgttcctctcgacagcactttgtcggtctcggtccctcagcgcgaaacgccagcgccactgggccccagcagggggcgccccaccctagaggaaggggcggggacgacggtggtgggcgggggcgggggcgggggtggcctgcacgggggcgggctccccgggcccccattggctgcaggcccccccacgccagggctccccccagctcccccccacatcggtccgtcctgcttccagctgctgcagcgcgccttcgccgccaaagcatccagcagccccctgctccggcccagcatggcgaccccgacccagacccccacaaagggtgagcgtcgtttggggagggggttgcaggggggctccgggatctgagagcctaggagagagggtgtcgggagattcaagcaatggtaaggcaagggagttgggggagggaggtccgctcctcctgtgggcggaagcccctgtaatgcgcccccccgatcgcccctccgggtctctgggacaccccctccccggcaggcgtcctgtgccagacctgcggttggagagtggcagtcccgggagaagggatgctcggacaggtcgctatggcaaccgggtggctggtcccgcaccgtggtggtagcagacggggaagagatgagcttgcagggtgggagcgggtgggtctgcgaccagagacgttctggaagatttcagggtccctggggtgggcaagggaaggggaggaggttcatgtccctcttctttccagtgctgtctcctagggtgtctgtttcctgaaacccttgacagccaggttcagaggaaaggagtgagagctgaaggaagagacagagagaagggatatagcaagagacagacagggagaacctggaagagacagagaccaagagaggcaggagatccagagtcacagatacaaagacccaggaagacaaatagatggactcagagagattcccagtggaggggagaggctgagagcagtagacagagatgcagagagagagagaaaaaaaaatgagagcctgggagatagtgggattgagaccgctatggagagagaagcagagagacggagggagagagacggacccatggggagagaggggagtagaaagagaagaagggagccatgtggggtggggcccaaaccactgcagtgagaccctatgtgtgggaatggggcgatgggaccctccttccagcccacagcaggggtgttttccaatcccagaggtgctgttgggtatacacctagctgcccctactgcccccatccagccacacactgatttccattccacaccaattaacccagttatgcacccacttaaacacccacttctaccgtcgccccctaatagcccccactgctaatcctgcttctgcagatgagcaaggcacagactgcttcaagagggagccagtgcccagcaagggtctccagcactgagggcaggggaccaggggtgctgagaagcccctggcagtgaagggaacccgaattccacttggatggctccctcccttccgcgcttcccagcaggcgggggctgctgcactgagccatatctgcagaatccgaagcagggcggggggtggggggggctgcagaggctggaagctaccctagggaggggggcagggctgaggcagcaggcctggcgggagcccagggcttctttttgcagaggtggtggttagcaggatcgatggcagcagacgggcagaggtgggaggacagactcctcaacccaacctcctctgcctccccctttcccagtcacagcatgacaggggaccgcaggtctcgggaaaccccgggggaggaaaagcatgttgtgcattgcaagctgcttaaggaaactaattaatgaattgttggggagcgaggggggaagaggggagagtctccctccaccctgccagagaacaggagggagagttaggagtgaacagaagagggatgcatgagcacagctgggtccgggtccctatccctgaaatggacccttagcttggccagaagccagtcctgcaggggcaacggcaggaggtgcaaaaggaggggagagggtcaagattgaaacctgcatctcacacaggacctcacaggggaccccacccagcctggggtggcgggacctatcacctctcttcacctcccaagatgccccagttgccatagcaaccacctccttcctgatatctctttggcagctggccaggagtagtgcacattcctttgcctgactcctggccccacccttagcccagccacgcctgagggcccaggttgccggggcagcagggaccagaggaggatcttccgcatggaggaggatcttccacatggaacaccagattctgggacaggggctcacccagtgggctcccgataactttggggaaggacgggtgtgtggaaaacagacaagtgagacaatccaccttttacagcctcctgcagcctaggactgcctcataatcattccttcattcattcatcccagaaaacttgaagagcctttcataaatgtcaggatgaacagcagtgatgagtcaaacaaatttactctctggtggggaaacttacacagagcacaagggaccctgaagcagcgtctcaccatcttggcgcttttgagtactaccgtcacaatttttgctttattcaaatattcctcacactgctatttatttaatttttttccttaaaaggattagcttttttatttttattttttgagacaaggtctcactctgtcgcctaggctggagtgcaatggcacgatcacagctcactgcagcctcaacatcctgggctcaatctatcctcctgcctcagcctcccaagtagctgggactacaaggcacttctgctacacccagctaatttttgtatttttcatagagactgcttttgctatgtttcccagcctggtctcaaacttctgggctcaagcaattcacccactttggcttcccaaagtgcttaggatgacaggcgtgggccaccatgcccaacccaggattagcttttgaaaacaacgagctttattttatagcaccatcacaactggaaaattaatcttctttttttttttgagacagagtctcgctctgtcatccaggctggagtgcagtggcacgatcttggcttactgcaacctctgcctcccgggttcaagcaattcttctgcctcagcctcccaagtagctgggactagcagcggcacaccaccacacccagctaatttttgtattgttagtacagatggggtttcaccatattggccaggctggtctcaaactcctgacctcgtgatccgcccaccttgtattcccaaagtgctgggattacaggcatgaatcactgtgcccagctggaaaattcatcttctttttgccttaagttgaaggcagcataagagcaatctgaagcaggtgatttcgcttttctgggtctggtgtcccccttccaggaaatggggatgaagatcgcacccatatgaaagagttgctatgaagattaagagtaaatgcgctgatatctgtcagatgcttagcagggaggctggaatggagtcagggctacccactgctggttacatcaataaataaaggagaaaaccaaataatgccacaaaattctgcctagattttattgcctgctgaagacttggagcccaaggcctgttttctcttaggtaaaggggggagattaacaagggttggaaggtggtaaagatacctcagcaccaacctaagccatcctctttgaagactagacagagacctgggaagggtaaacttacacattgtgtgaaccgtggtcttgctttggggccacctctatcagtcagtttcggctacagcatgctgtggtaacaaacaggtgttgctttggggccacctctatcaatcagtttcagctagagtatgctgtggtaacaaatagtaccaaaagtctcaggggcttatgacaaccaggttcacgtatacgtccatcacaggttgaccagtcaccaaagaaaactagagcagtcaccactgtgaacattcaggccaccaggctagaagtgaaacagagctttggcctggaggcctgaatgttcctgaatgtttaaatgccccagcctggaagtgacaatgcacttctactcaccgttccttggccagaattagtcacatggccctacccaacctccagggagccatccatctgagcctggaagggggaaggagaacaccaacgacatcaggcatcaccctggcacccctcaccctctccccatgtggcagacagtctgctgccaaattctgctctagggaaggccaaatataataagaactgtcagaggcattcgagaaccatcaggatgaacttgttgaatgggaaggatgttctgagctctcctgcaggggaacatgattagggtccaggaaggtgggaagtggagaaaagtgaatccagagacacacacacattttatccacatgtgaacatttctgaaatcattatgtgtcttctaatggatggggacatttcacgtggtagagttccaaacatatttacacatacacacacacacagggaaaactattacaaactcaattttgaatcttaaacttgatggtgccttagaaataagtaataatgggccaggcatggtggctcacatctgtaatcccagcactatgggaggctgaggcgggcagatcatcggaggtcaggagtttgagaccagcccagccaacatggtgaaatcccgtctgtactaaaaatacaaaaattagccagcagtggtagtgcacacctatagtcccggtccttgggaggctgaggcaggagaattgcttgaacctgggagatggaggttgtagtgagctgagatcgcgccactgcactccagcctgggtgacagggcaaggccctgtctcaaaaaaagaaagaaggaaagaaagaagaaagaaggaaagaaagaaagaaagaaagaaagaaagaaagaaagaaagaaagaaagaaagaaagaaagaaagaaagagagagagaaagaaagaggggagggagggagggagggaggaaagaaaaagaaataagtaatgtggggtatgaatcagcacagcttccctgtactggatggagtatcaggagtgagtggatgtcagcagtagcagcaggtgcctgtcggagctctcaggtgactgagaagttttagggagtattcaggggaagctgagacattcattggttcaccagtggaaatggggtctgttttaacctcatgacatcatgtgcaagtgggagtgtgtctgtgtttttcagggaatgagtccatagcttgcatcagacctccataggggtccagaaccaggactgccatgtagtttgagaagattgtacactgcatagaggatggtgctgactgatggagtgagtaggggctggaatccagcttgagctatgctcttccagccttgcggcctgccatgaggccacatcatccaaaccaaggggtctctatctgacttccacaaagaaatgattaggccagtggctccatctggatcctaaaaaatattaagaaatacactgttaagttttttttttctttctctttttctctgcttctttccctcagctcctgaggaacctgacccattttactatggtgagtgttggatttggggatagggctggactggggagtagctgcaggtgctcacagatcactccggacatggcttcagctgtggccacacgatacgtgctgggccactggccacgggaccatatatgtgggtgtggttcacatcagctgagttcatggagggcagaaccagatgggggagtggggatgcctcacactctctctgagcccccttcaggtctcaccgggatctgggctggtgccttggtgtcgccagagaagcagatgaaggaaaaccttagaagcaatgactctgagcccaggctgcctggatttgaatcctgccttatccactcactagctgtatggccttgggcaagcaactttgcctctctgggcccttctgtaaacaagggatagtaatagttcccacctatgaggactgtgggaaagatacctgactggtggcattaaatctcctccatggcactgaagctcaaataagctaccccaggcctggtagatcgggctccagtttcccctctgaacaccctcctcttgcccccaccccacccctttgctcattcatactttttccctaggtgtcaatttctctcccatctcaggacctttgcgtgtgctatgattctgcagtaatgcttctcctttgtacacgaccggctaaggctcccccttattcaggcctcagatcaaacatagactactctactgggataggccctcctgactccctggcaaggaagagccacaccatactcagctggtgtcgcatgacttgtttttgagggggattgtttctttaatgttttatcacaatacgaaagtcaactccttgctggtagaggcctggaccactactggtacagagtgagtgctccataaattcatatctcaacaaatacttagcgggcacaggctctatttctggcaatgttccaagcagctggagacactgcaatgaaccacacagacaagaattcaagaatgcaagaattcctgccctcctcctggaccttccactcaatgggaaagggacagatactcaagaaaacaaaatatgaaaattatatattagacaagaatattattggccaggtatggtggctcataactgtaatgctagtgctttgggaggctgaggcaggaggatcgctcaagtccaggagtttgaagctgcaatgaactatgatcgtgatttttttttctttttttagacaaagtctgactctgtggctcaggctggagtgcagtagcacaatctcggctcactgcaactcccgcctcccaggttcaagtgcttctcctgcctcagcctcccgagtagctgggactacaggcccacaccactgcacctggctaattttcatatttttagaagagacaggatttcaccatgttggccaggctggtcttggactcctgacctcaagtgatctgcctgccttggcctcccaaagtgctgagattacaggctcattacaggcatgagccactgtgcccagctctacataaaaaatttaaaaattagctgggcatggtggtgtgtgcctgtagtct[134 bp omitted]aatattatgaggcaagaatattaggcaagaataattcctatgaagtaaaataaagaagggaatgagattggaaagtgtggaggagaggatggaaattctgaataggacagccagaggttttgctcacaatcaaataaagcccagacactggtgagggaaggagccacgtggatatttgggggaagagctttcaggctgcaggaacagccagtgcaaaggccttgggataggatcatgctggatatgccccaggaacagtggggaggccactgtggctggagtaggattgatggggagagtgaggtggggtgaggtccaagaaggaaaggaactggatcatatgggactttgagggccctagtgaggaatgtggtttctaccttgagggcaatgggcgggaggagggctctgagcagaggagaaaccagatctgactcaaatgttgatgggtccttgtggctatcagaggtgggagtgcaggcaggccagcaagaccctagagaaggctgctgcagaggccagatgggcgacaatggtggacagaaccagggccagggaggaggtggtagagggagagtattatatatatatccagggtggaaagcgcagggggagagggcaagggaggaaagtagagggtacagagggcaaggggagctaacggtgcccaagcccacaccctacatcctcacatcaaccccctgaaggagtgtccagcacagtccacagcctccctgggcgattctgggttcctggctgggccacccagagccaggactgggctccaggtgcagccaaggtgctgtccctgcctcgatgtcccccattatcttccccagactacaacacggtgcagactgtgggcatgactctggcaaccatcttgttcctgctgggtatcctcatcgtcatcagtaagtgcgacccattcctgggctgcctcagcctccgcttcctctgctggctttcatccatatcctacccgctatgtcctgtcttcttgttctgtctctctctcccaacaggcaagaaggtgaagtgcaggaaggcggactccaggtctgagaggtctggcagcagtgggcaaagagcgggagggggcctcggggtgcctccctagcagatgggcaggatccactgggcctgccatgcgttttccccaaagcctatggttattgaacctctttctacttttctctctcatctctgcctccacagcccaacctgcaaatcctgtaagtctgagcttccctcttcaggtgagggtgagaaactgtgtggttctgggagagttttaggtggggcagggaagggaaccctcagaagggaagtcgcggggatggactggacgcagggggcggagggggggtggtgcctgcagatatcacaggacaattccctaggaagctgaggaaattccgcagatgaaagatgctaaacctggctgggcgcggtggctcatgcctgtaattccaacactttgggaggctgaggcaggcagatcacctgaggtcaggagatcgagatcagcccggccaacatggtgaaacaccgtctctgctaaaaatgcaaaaattagccgggcatggtggtgcgcacctgtaatcccagctactcaggaggctgaggcaagagaatcacctgaacctgggaggtggaggttgcaatgagctgaggttgtgccactccactccagcctgggtgatagagtgagactgtcaaaaaaaaaaaaaaaaaaaaagaggaaggaagaaatgaaggaaggaagggagggagggagggaaaagaaagatgatgctaaaccgtggggaggctgtgggatgtgacatgtcccagagtccacagagattcccagaaacaaatgctcaagcctataaaagccaggacaagctgatttgccaggagaggaagacacaggcctgtgaagagaagggccccatgtgggaggagctctgtcaatcaggagggagagagagggagcactgaggaagacggggagaggctttccagacttgatcgttcagccaggcagatccaggatgaaatagccgaggaagcgggacagagggagggagggaaggtttctgaatagttgcatcaaaataacaaaaagagagatgaatagaatgcagattttagaattcacattggaaaagaacatatgggatgcagggaatgtgaggatggagaagaaagctgggaagaacaggaggggagagagtggagaggacggaggtgttggggagaatgtgggaaggaggagcccaggaaggaaggggaggaggatgggaggaggagggcgtggagggtggaggagggagaatgggtgtaagcatggaaagtgtaaagggagagcgagagggatgcagggcaagcatgtcaacgaaagactgatctctttgaggctgttaattttaattatgtaaaaataacttgacctgtttttagtggaaatgcagcctttctggagacttgtaaaagaacagaaatgggaatttctgtgtctcttataaagttcttataactaaaaaaaaaaaaaaaaaaaaaaaaaatgcgggagggggacacgggttattcaatggttgagaagtatttggtgtggaatttgtttcacgttcctttttttttttttttttttttttttttttgagacagagtcttgctgtgtcctctgttgcccaggctggagtgcagtggcacgatctcagcttattacaacactgcaacctctgcgtcctgggttcaagcgattctcctgcctcagcctcccaaatagctgggactacaggcacacaccaccacacccggctaatttttatatctttagcagagatggtggttcaccattttggccaggctggtctcaaactcctgacctcaaacgatccgccatcctcggcctcccaaagtgcttggattacaggcgtgagccacagcgcttggcctgtttcatgtttatttaatgagttttaaaacatgaacaaggcacttatggatgcgtggggcagcatgggggttggccttgtcacctggggcacagctgaagactttgcacaggtttctggtctatcctaggtgaatgatggtctgcagcgggtggggaatgggggacttcccgttgtatccaaatgttcaggacagggagtgtaggaaaggagtgagggtgtaggaggagattgcaaatgggaagggagatggggactccctttctggcaggcggatagccccaaaagcccaggttgggtctggggtcgccagccccgtagcaggtgtttctctccatgacagcagccaggaggtgtccccaagggaacaagacattagagtgtgggaggcaagacagctcctcagtgttagctctggggtgacagtccctggggtctggcttccatggtgccggggaatggagagccaacgagctgtggggagggaggcagtttccacctttctagtggctcacgcaccccctctctccccagcccctggtggcggcggcgtgtaacaccttcccgaggaaactccgctgccgaccctgcctgagcgcgggagcctgaggaccgggtggaggcggtggggacccagccgcgcgccgggagcgctccccggaatgagccgccccacccaccccaaggctggagccgctgcaccctgctgtccctctccaggccttggcaatgacgatcccccaaagagcccgtctgcaccccagacccagggcctcaggcctccagctcctgggatccgggagtccatcccggcccagcacccccagcatccccgtgtatggcccccctgcacctccttgtctcatccccgaagatccgtccccctggcccctcagtgtccatgtcttgagcttaataaatgtgcatttggttttttcctctgttctgtctgtgtgttctcatctgtggggcacggtgtgggtaggggtgcagaactgaacctggggtagctctcccctgcgtgcccggagtcgccccctcttcattctcctcccccagtgccccgagatgccccccttcaatcccttctccttcctcaacacctccggatttgtcctttcccttcctccagcgaccccagaatagagccctcccgtttctccccctgctctctcagaggcgtccactcaccctagacctgcctgccccatccccgttcccaccctctcccaccactatgccctcacccctgccccccgtcgccctcagcgattccccctcctgctcccaccccgggctctgaagccaggaaacccaagaggaaatgactgagcccgtctgggtccccgcccgctcgcgctcccctggccacaccctccgcctggacgcagcagccaccgccgcgtccctctctccacgaggctgccggcttaggacccccagctccgacgtaagtccctctcgtgcgccacctccatccgctgcccctctgcccacgggccgggctcaggtgggtaggggtttgaccccttccgctcctctccgccccccatccacgcccacatctctctgcctcctctcctgggctacagtgggccgctctgcctcgctcccgcccgcctgcctcagtctccccagctctctgccacccccctcggaccagtgcctcttaggtctctccagcgcgccatccctgcaaggcggcccctgacaccaactcactttttcctctgagcgcgggaggcgttactcactcttcctccttcccctcctcgccgactcccgggctctgggcccctgggggagggaagaggcctcctatctactcctctgccccagtcccctccttgcgtcagtcccagtgagggataagcgcctggcggaaggcgcagggaggtgtttctctgcttcaggagtgcccgccggcccttgcagctgctggaagacccatttatctcatgcttcttgttttctttggggacctgcaggggaaggaagcagggtgacggtttggtatccccacctaagaccctcccctttcccctgaggccagccgtcagcccctggcagggggtcttggaagccagaggtttttgctcagggcagggaaagggctgcaggatccccgggggctgccggaggtcggtctcactgacatcatggctgaccccagcatcgcctggtcccacagatgtcgccctctggtcgcctgtgtcttctcaccatcgttggcctgattctccccaccagaggtaagacccatctctggcctccaccctgccccagagcccccagccaggccagccccacgtgtgctgcggggtgggtggttggcccgtgtgaacgttgtcctgccctgtcaccctcccgctgagccggcaccaggaagtggggatccctatggcggggcgacgttacaccctctttggacacctcagacccgggtggctgcttccagtgagtctggccagggcctgtcctgctgagcatcctccaatttcacctccaagaagaactcactgagtttcatttggcggggagattggtgtcggttttctactcagcagccaggaaacctaggctcccagagtccccaggcattacacagttaggcaaagctgttgagctggggttagtccaaagagttggcaacatctcagccttgcctggaaagtgtctcctgaaagatgggaaccacaggggggtattgatcgttctttctgtgtggcaggtgtggtgtgtgttaggtcagttaggctttgcctctgacagtcagtcacacctgttgtcttgcccattttactgatgaggaaactgaggctcagcgaagggaagtgccctgtgtcagaggagaatgggtggaggagctgagaaaacaactgtcctgcctgcccccagaacccagggtgcatgccccactgaaggcgccctcatttctccttcataaaatgattttcatatactcgttcagtcatttgacaaatatttattgagcacctactatgtgctagatattctgtgcactggggaaacagcactgaataaaacaagaggtcacactctagtggagagagacaagttagtaaattatatcgtgtgctaggaggtgatacgtgcttgcagaaaagtagaggtaatgaggattgtttaaactgggtggtcagggagggcctcactgaggaggtgacatttggaccaacaaacacttggaggaaatgagggaatgagctttgcaggtgtctgggggctgagtgttgtctggtgtgttttaagaatagcaggcaggtggggtggctgggttgggatgagaaggggcagagtgggatgacgagaggacagagaagtgatgggaccagatggaggaggacttacgggccacgtgagggctttgcttttatgtggagtgaagtgcagccagggcagggctctgaaccaggcgggccccgacctgactcaggtggtcccaggctccctctggctgcaggttggaacagactgtgggggcggagacaggagcagggagcccaagaaggaggctgctgggatgtccaggctggagggtacagaggcaggaccaggatgggggcagtggagttatccagcactgaccacatggtaagccgtgtgggagaccctttccctgctctgtgtcatttcaccctatctacagccctgtgaagtagattcagttattatccctgctttgcagatgaagcaactgaggctcagagaaaggacttcacttgttccaggtcacacagcaagaaagttgttgggggcaggatttgaaaccagggcccaggctcaccctagcacctgggctcactagactaaactgactttcccatcccacagggatgggcggggagggggactagaagaagggttcccaggcattggcatagctgaaaacactttcagaattatggattgatgcagccaaagctgagtgattccaccagcagacaggacccctaaggtttcaccagggaggcgagggcgggggtggtgagaggagggggaccaggctccctcctgacttctcatccttgattccccaggacagacgttgaaagataccacgtccagttcttcagcagactcaactatcatggacattcaggtcccgacacgagccccaggtgaggaaagggacacatctatcaagatcctgtcattgcaaataacaacagcaacaaaaatcccaaacttggaccaaacaagggaatttatggatttatgtaacgaaaaagtccaggtacagaccttcaggcatggcttgatctaggtgctcaaatgatgctatcagaacctctctccacctcttggttctgttttctctgtgttggcttcattttcaggaagagtctcctctcatggggccaagatgatcccttgaagcctggggctgtcatcctgtctgctaagaatcccagcaagagaatttcctttccccagtccagcaaatgtcccagaactgagttatctttggccaggctcaggtcgtatccctgagctggccactgtggccacaggcatagaaagctgattggccaggcctgggttccatgtccaacctccaccagggctggtgtcagccccgctgaataaagtggaccaagagtcagggaaggatggtccctaaaggaagttctgggggcttttatcagagcaggtgcatttgggaagctgagttaaacatgtttttttaggcagcacttctcagagtcttgagaaagacaatttgcagccagcatctcgaagaaggagctgtagtgtggcatctgtgggacgtaaggtcccaaagaaggggacatattggttacacatttcggcagttagcaaatggctggattaattaagccatttctattacattaaagttgagttgctacgggaatctctggcatctccacccatagaccttgcccacttctttttctctctccttttctctccgtgactccttgtttctggactccagatgcagtctacacagaactccagcccacctctccaaccccaacctggcctgctgatggtgagtagtgcaggggcaggcggcggggacaggaccaagacaaacaaagtttcccctcttcctctgacactataggtctttggttgcccatttcagtccctactcccagctctgaatgccctggtttactctgggtggggacagccaactccattcaattctttagaaaaagaaaaccaaaacgcttttgaaattgtgaaattaacatgcatatagaaaaatacaaaacccataaatttacagtgtaataacttactctaaattgaatccctatgtaactaccaaccgggtcaaggagcagaactttgcaaacacccccagaaagtctctgtgtgccagtcccatttatttcttcctttcatctcttttttctctgatcccttttttgaattttttgaacaatttttggacgttttcttgaagtataattcaaaaagtgctcccggccaggcacagtggctcatgcctataatcccagcactttgagaggccaaggtggatggatcacttgagctcaggagttctagaccagcctgggcaacacagtgagactccatctctacagaaaaatacaaaaattagccgagtgcgttggcgtgctcctgtagtcccagctactcgaaaggctgaggcaggagaatcacttaagcccagaggcagaggttgcagtgagccaagatcttgccactgcactccagcctgggcaacagagcgaaaccctgtctcaaaaaaaaaaaaaagtgctccctgattttttcaatcgatgtttaaagacacagtagtacaaaaacacattctgcctggaaagaataaaatgattgtaggcaaaactaaacccctttgtcacctcccctccccaatcctcgttctctccctctgtctctgagaggtccccactgtcagcattggggtaggtccccagtgataccacatcccatgtatattacttggagaaaatgcactgactgtgtgctgtgtttgtgtgagcttaaggagaccttatgattgttctgcagcttgctttgtttcttcgtgcagtcgtatgtttggaagttcttctcacatcactgcataaagacttgttttgttttctctcctgcctggtattccacaaggcgcctatatcacagcttatggagtcacacacttcttgatgaacatgttggctgtttccagctttttctgtctacacacagcaccacaatgagcaactttgtcccttcctccttgagcaaacgcacttggaatatgtactgactatgtgctggtcatggttctaaatattttgcgtatgttaactcattcaaccttcacgcaaaccctaagaggcagaaattaccattgtccccattttacagacaaggaaacagaggctgtgagtaactggttcaaggtctcacaacaagtcagggacgcagctggaatcgaagtccaggaatctggcaccagagcctgtgcttttatccaagacaatacagggcaaaggacatgcatgcttaatgttttaaaatttgccctcctgccgcccaggcacagtggctcatgcctgtcatcccagcacttttggaggctgaggcgggtggatcgcttgagcccaggaatttgagaccagcctggacaacacagcaaaacctattctctacaaaaagtacaaaatgattagctgggcatggtggcatgtgcctgtagtcccagctacctgggaggctaaggcgggagaatcacttgagcccaagagttcaaggctacagtgagctatgattgcaccactgcactccagctcaggtgatagagtgagaccctgtctcaaaaataaataaaagtaaaaataaaagttcccctcccaagtgactgtacccatttcctaacccaccagcagtgtgcaggagtgtcccccttcccaaccctacagtgacacttggtatactgacattttcaggttttgccagcctcttaggttttttctgagatggagttttgctcttgttgcccaggtcgctgtgcaatggtgcaatctcggctcaccacaacctctgcctcccaggttcaagcaattctccctcagcctcccgagtagctgagattagaggcatgagcgaccacgcccagctaattttgtatttttagtagagacagggtttctccatgttggtcaggctggtctcgaactcccgacctaaggtaatctgcccgcctcggcctcccaaagtgctgggaatacagacataagccaccgcgcccggccccaattctctttccccagtgactctttcttatccttccctccttgctctcctgacctgaatagaaacaccacaaccccagacccagacccagcaactggaaggaacggatgggcctctagtgacagatccagagacacacaagagcaccaaagcaggtatagcatgggactgagagcagcagcctacgatttttgtttaattctctatctaggtcaacatttccctcagtacgtttctcagtgcccctgtttggggaattgttaatacatttaaaaaaaatgtttttggtttgtggtcaaagttatttggggaaccctgagttaaagttaaccatgtttctttgtggcaggacttctgagagtcttcattaagctaattttcagcaaaggatccccaaggggcagcgtgcagtatgcagtgtttccctaactgatagactttggaactttctttctgtcagttcccctcggagggctggggctatagaatgtgcctgtggatatttcttttttgtacatctccttaatgttagagcaggagcttttcagttgcaaaatatagaaaattcaccttaaacacacacacacacacacacacacacaaaagaatgattggctatataagttctggaaagtccagaagtagccaacttcaggcatagctggatcaaggcgagtaagcactgtcatgagtgctttgttccctctcttggttctgttgtcttcattctctactaacttctcccctcttgatggcagagatggtcccatagttctaactttaggtcacatacgtggtggctagagaacaaaatctttcccattatttctagcctgaggcctagaattgactctcattggttcagctggagtcacatgctcatgtctgaaccaatgagagcctgagaaatgagctgctctcattggtcaggcctgagtcttgtgccccaccctggggctagagaagaggctcagccagccatgcctgaaccacatagaccaagagtcagggaagaggggattttcctttggacaagtgagttagtattaccagaaggtgtgggaaaggagactgagctgagataaggcaacagatcgcctctaatgcctgcgtgatgatccttatttgaggggcagccccacactggaaagtgttgtagagtaggccactcccagagagacatgtacagttgtgcagactgggtactgaacgagagcaccacctctcgggcaatgccattccctttgtcggtctttataattgttccagttttctagtgatagcagcaaagcatctcattcttacagaatctatctattaaaacaatcctacaatggatggaaataaagtgctttacagaagggaacttttctagtttgtacaaaagtgcacctgtaggggtgggggatagcagctgtgtccacacttatcaatgataaagcattctcacatcactgcattaatttactgagtctttgctgacctgagttgctctatgtattggtccatgttcctggatatatgtgacagaaattcatcaaggacaaatggctgtcactgctgagcctctgggttgcctagaggctgggcatgaaagcccccagggcctctcttcctcctctatctttgcttctcttccacctaggaaggaaatggctcatgttatttgagcctcctagctcaaaacttccagacttcacctagggttttaatctgctcaggttacgataacaaaataccacagactggatggcttaaacaataggaattcatttctcccggttctggagatgggaagtccaagatcaaggtgccagaagggttggtgtctgtcgagggctccccttgggtcacagacagccattctcttgctctgtcttcaccatgtcctctccatgtgtgggtgggcttgtgagcttgaaagcaagctctctggtgtcttcttataagggcactaatcccatcatgagggccccaccctcatgatcctatctaaccctaattacctcccaaaggccctcgctccaaaataccatcacatggaatttggtggggtggatagaattcagtctatagtacctagctgtcactcaatatccctacttgggatttcaaaggtctcagggaaggaccagactgaggtcacaagcttccttttgtagcctgggttataactggggaagggagggcaatgtcttcccacaaagaaagggagagctgttccagaaggaggaagagtgctgagcagacagtaatagcaatggctgacttttgctgagagcttgttcatgctgggcactgtgctaagcttctgtgtattcagtcatttgatgcttgtgatcatcctgtgtggtgggaactgtcattactcccattttacaggaaaaggaactgaggcccagagaggttactcagcttgccctaggcaatacagccaagagtggcagaaccggaatttgagtccagactgtctcaccccagggtgcatgagcaccacacaccagtatggctgtccttcgcattcctgtggtctctgccgtggatctggcttataccttcctctgggcaatgcattccctgaatatcttgtaatccttggttgccagttcctatttagggtgtggggcactgagataattccagggaacttgggtttcacgagggagcttctctgtctgctggcttcttgttgaggcctccgatgtggtgtgggggcacttctcagtgcttgggggaggccttttctttggaggtactgatttttttttttttttcaagagaagaatcctttggtattttcggtctgggggcagaggtgatattcagaatagttttgttgttgttgttgtttttgagacagagtgttgctctgttgcccagactggagtgcagtggcgaaatcttggctcactgcaatctccacctcccgagttcaggcaattctcctgcctcagcctcccaagtatctgggattacaggtgtgtgccaccaggcccagttaatttttgtatttttagtagaggcggggtttcaccatgttggccagactggtcttgagctcttggcttcaggtgatctgcccgcctcagtctcccaaagtgctggggtttacagacatgagccactgcacccagccaatattcagaatgttttacaagtttctccagactatgtagctgggtcagagtccttggcaggtgttgccctttcgttcctttatctcctggattatagtgtgggccagaaggtcctaggagaggggtctggagtccctcggggattgaggcagatcagatagtcgcaaccggggctatgtgcttatttcagcatttcaatgcctgtcattacttattgcctctaggtgtggagtaggggggatgcctgaccctgcacaccagctgtgtagatgtgggagaggggtttcttccagatgcagactctcagtaatatcccttgtttctgcctccatggctcactcctgccctccactgatctggccactctctcagctcatcccactgatgacaccacgacgctctctgagagaccatccccaagcacagacgtccagacagacccccagaccctcaagccatctggttagtaactgcctccccagactggaaacaggctattttctgttcactgtgtatttccagcacctggagtacagcccagcacagaatagttctcagtaaagacgtgatgggaaagtaaatgacttcaagccaggcagagggtgggcacatgataaatgtctgaatagataagtgaatgcataaattattgctgcatacaaaccacctaaaaactcagtggcttaaaaggataaccatttatttagctctcatttctgcaatttggaaatctagggtgtgctcagctggctggttcttctggtttcagctggacttactcatgcgtctgaggtcagttgtgggtcagcaaggacctctgtttctaggggcaatttgattctttccctggtgatcttatccaccacttcctgcccagtcagccccccagtgaatgaatggaaatgatacgcccatgggtcacatagagagcccattcatccattcattcaacaaatagtcactgagtacttgtgtgctaggctagttctaggggacagagatagagtggtgaacaagccagaaaaaatctctgccctcatggaactactattctagtggtaagagaaacacaacaagaaataatcataattatgtatcagttgatttcaacttgctatcaagaaaagtaaagtagggttagagagtgactggggagtacaggttgagtattccttatccaaaatgctttggaccaggagactttcagatttcagattttagaatatttgcattatacttaccagttcaactttcctgacccaaaaatctgaagtccaaaatgttccagtgggcatttcctttcggtgtcatgtcagactgttactggaaaggggttccgatccagaccccaagaaagggctgttggatcttgcacaaaaaaagaattcagagagtccatagagtttatttagaaagtaaaggaataaagaatggctactctataggcagagcagccccacaggctgctggttgcctgtttttatggttgtttcttcgttatatgctaaacaaggggtggattattcatgagttttctgggaaaggggtgggcaattcccagaactgaggattcctcccctttttatactgtatagggtaacttcctgatgttgccatggcatttgaaactgtcatggtgctggtaggagtgccttttagcatgctaatgtattataactaatgtataatgagctgtgaggatgaccagaggtcactgtcattgccatcttggttttggtgggttttaactggcttctttactgcaacctgttttatcagcaaggcctttatgacctgtatctcgtgccgacctcctatctcatcctgtgactaacaatgtctaacctctggggaatacagcccagtaggtctcagccttattttaccctattcgagatggagttgctctggttcaaacacccctgacatgacatcaaaaagtgtcagatttggggacattttggattttggatttggggattagggatagtcaacctgtatttcatatacaaaaccagggagggccccactgggaagggagtgaaggagggagccatgcggatgtctagggaaagtgtgttccaggcagaggaaacagccagtgcaaaggccctgaggtgagaaggtgtctgcatgttcaacagcagggaggccagtagggctggagtgcagggagtgagggggataggaaggaaatgagattagaggaataatgggagccagattgtgtgccatggtgaagattttgggttttgttctaagggtacccaggtatccccctttcctgactttgccattcacgtattcacttcacaaacctttgctgaaccctgacttgctctttgtctgcctctccaggttttcatgaggatgaccccttcttctatggtaagttatccacaggaagatgtgggggaaggaaaggtgaggtccgtctgactctaccccttcatttttctctctgcagatgaacacaccctccggaaacgggggctgttggtcgcagctgtgctgttcatcacaggcatcatcatcctcaccagtgagaactggggttgggtgggaaggacaccaagaccaggagggggacttatgacggagggctgggttctcaaaggtccctgggcaattttgttttaaatgaggtatctattagctgcatatacatacaaaccaccacagaattcagtggtttaaaataatgaccatttattgagctctcaataccacagtttggaaacataggctgggctcagctgggtgattcttctggtctcaactggatttactcttgcatctgagttcagttgtgggtcagcaggaaactttgtttctggggtgccttggctctttgccacatcatcttatccttcactaagctagcctgggcttgttcgcatggtggtggcagggatctaagatagagtgaatgcatgcaggctcagaactggccattatcacttctgcctcattccataggtcaaagcaagtcatgaggctgggtttcattcaaggaaatagactccacctcttgatgggaagataggcaaagtcacatggcaaaggacatggatactgacagggaggggtagagactaagggccatttggcggtcagcataccaccccagcagtcacaagcccactgcacccaggcctggcagggaacaagggctgaaaaaggctgtgtcaggaggagataactgaggattaaatgcctcatggaacaaccccacccactcaatccagcaagaatagaggcttgaagcagccagagtaactactcttttaagagcttaatgtttctgtaaaatcttttggtactcaaatgttgacagctgtgttgatcagggtcatggcaggtggcagaaggacctgcaaacgattaactggagaaagtttaatagagtgatatctctggaggtacaggcagggcaatgagatggtgcagtgccctaggactagcaaggatggggacctgttatcccccagcctgagggacaagaggaggcactggctttgcaggaggcctggtgagagatggaactggaggtggggctgctggcaggagctgtggcctcagaaagagggttccagccactgcctcacttgtgaccaaaccaggagggagcaggggtggtggggatcagatacctaaacctccctctcctcccacccccctgtctcctgccaatgcttaaccagagggcaaggggcccagggccccatgcagggagaggaagttgtggggaaaggcagaataacaagcagagaaactaattttttaaaaaggtttttaaaatgttgtgggtgaaataaaacacgagctatcagttaatctgtataaccaatgccaagtttcattacctctcttgtccaacttcctcatcaagaaaatgagcatagccacatctttttttgccttaaggggagaggcagaattctaacaatcataagacatgattcctgatgtgtgcgtgatccccactgaatctgagagtcaagcactgttgcctcggtcatacaacatgtatgtgttgatcctgactttgcaccaggtcctattctcaccccagtggagaagttaaggctcagagagttaaggagtttgcctaaggtcacacagcacagaagagtcagtaaattcatttgctggcgggacacggtggctcactcctgtaatcccagtactttgggaggccaaggtgggaggatggcttgagcccaggggttcaagaccagcatgggcaaaatagcaagaccctatctctacacaaataattttttttacttaaaaaaaaaaaagaatcagtgaaggattggacccaggtttgtgtgagagcagagcctgaacgttagctctggggccatgtatttttccaacagcaaatatttgtgggctcctagtctgtgccaaacctgtgctgggtgatgctgggggcatggtggtgacaagcagccctggtccctgtcctcaggagctcacatctggtcgaagatgataagcaaataaatgcatgaatgagtggatacagagaaagatatttgccaaataaagcagagtgacagggaagagaggggtggggagagaagccctccctggagtggtgaaattggaactgatccctgatgatgagatgaatcaccaggtagagagagcagcaagtgccaagccctggaggcaggaatgagctgcgcccattgctatagcagcagaggaggcaaagtagccaggacagggtaggttgggggagaggagaagacgaggccagagagctgaggggctggaggaggcaagggtggcaggtgttttctaaagtacccttggcttctaagttccccctccctcactctggagcagccacagatgagtctctggaacccatctgtgtcctcgtacctcaaggcctttgcgctgctgttccctctgcctgtaacacccttcctccaggtgtctcccttacgtccttcagacctttgttcaaatgtcacctccttggcaggccacagtggttcacgtatgtaatcccaggactttgggaggctgaggcaggtggatcccttgaggccaggagttcaagaccagcttggccaacatggtgaaaccctgtctttactaaaaatacaaaaattagctgggcttggtggcacatgcctgtcatcccagctactcgggaggctgaggcgggagaatcgcttgaatccaggaggtgggggttgcagtgagctgagattgtgccactgcattccagcctgggtgacacagcaagactctgtctcaaaaaaaaaaaaaaaaagtaacctcctcattgaagccccagtagccatccctgtgaggatgagcccagctcctgggcctccatgcctccttcctggccttatttccctttgtaggacttaacaccctcccacttagcaccttcatacatttgattttgtaatttttctccttgttggtctttccccatagaaagacaactctgccagggcagggatttttttctttgtcctcaactgtgttcttagtgcctgaatgaatgaataagtgagatacaaaataatgggagtttccaaacggctcatctgtgagcctgtgtgggaagggcctctcgcagggccccagcactggctgttctcggtgtgtttctccatcatttgtttatggagttgcctttgagtttcccgaggggcagggttgatcaatctggttccccagccccacaacacacgataagaatcaatatcactctagctcgtgactgaatcatttccttcacccacaggtggcaagtgcaggcagctgtcccggttatgccggaatcgttgcaggtgagtccatcagaaacaggagctgacaacctgctgggcacccgaagaccaagccccctgccagctcaccgtgcccagcctcctgcatcccctcgaagagcctggccagagagggaagacacagatgatgaagctggagccagggctgccggtccgagtctcctacctcccccaaccctgcccgcccctgaaggctacctggcgccttgggggctgtccctcaagttatctcctctgctaagacaaaaagtaaagcactgtggtctttgccccaggatctctgatcatttgggacaggggagtggaaagaggaggcaggggctgcctcagggccctcaaggaataaagcaaaggccggacgtggtggcccacacctataaccccagcactttgggaggctaaggcgggaggatcacttgaggccagtagttcaagactagtctgggcaacatagtgagaccttgactctacaaaaaataaaaatattagctgggcatggtggtgcgtgcctagagtcccagctactcaggaggctgaggcaggagaactgcttgagcccaggaggtcgagactgtagtgagctgtgattgcaccactatattcctgcctgggtgacagagtgagatcctgtttctaaaaaagaaaaatataacaagccaaggcagggaataaagttagggaagccagtctagtgtgtggcagacaggatggcggtgggcggttgcaggtgagtctgtgtgctgggtgactggccagagagagagtcagggctggcttctgcctgcagtcagtttgagaacactggcgtggtccccataagggagcaggtacccagtgtcagctcacccctaacatttttaagggtttggaggtcccagatcacagggatcccctctccttcctacttctagtcccttcccacaccgggaggggccttgcacacatgagtgtggatgccacagcctgcacctccaagctctatccacagcccccaatacacaaatggccaccctccagggcacttcttggcttaggaatgtgtccaccaagaaggccctgcaggccccagcatgggcgcagagcaatttgggagaggaattcaggggtcctagggatctagaacatggtcgagaagagcataggtgctggtgggcacttcctgaaggcccttgggctcgaccagattaggccagagcaggtcccctgaagtgcaggacttagaccagagctctactcaggcttaagggtcgtgccaaaatcaagagacaaggtcccggtcacagggcttacataacagtgtttcacaacttcaggtcatagcccattcatgggttactaaatcagtttagtgggctctgagtagcataagaaaaaagagagaaagaaagaataatttttaaaagacattagtatatcactaataaatgtaagattgtatatatataatatacatagcatgtcatatacatcatatgcaatataattatatataatgtatagaatatgacaattataacatatataattgttattaatgcatcactataaatgttattactgcatcactaatctcaaatataagactgtatatataatatgtagcatgttatatacattatatatgtatgcatatcttcattataatatgtatattatacacatacagggggatactaaaattatttcattatttgcacctaccacataaagcagaacagatgtctaactgatcaggaggggatgtcatctagatatgagtatacatttacatatacaatggattatgtctttttttttctcttttttttttttagatggactcttgctctgtcacccaagctggactgcagtggagtgatctcagctcactgcaacctctgcttcccaggttcaagcgattctcctgcctcagcctcccaagcagctgagatcacaggcgcccgccaccacgcctggctaatttttgtatttttagtagagatggggtttcgccatgtcggccaggcttgtctcgaactcctgacttcaggtgatccgcccgcctcagcctcccaaagtgctgggattacaggtgtgagccaccatgcccagcctgattatatatattaagttgaataatttgaaaatgtcaatattcaaatgtgtttgacctataaaactagcaatgtcatatggctcaacctaacagtatacatgatagtgtgatatgaaatgcatttcatactgcaggttgctttttgaaaacgttgagaagcactgggcagtgggggacataggttgtggcagggaagataaatttccggttagaacaggaaatgctggcagctatttttgcctgctggctgggtggtggccacaccagtgtgtgcaagatgtttctagtacgatagttctcaaacttcaatcatcacatattcccaacttatgacatattttcaccccatctgtactattattctctcttttaaaagatcaactccctttttagtttaaacatatttattttaaaagccacaatcatgtatggaaaatcagtactgcttgatatagatagaagatagctataaagataaatccaaggccaggcgcagtggctcacgcctgtaatctcagcactttgggagggagaccgaggtgggtagattatttggggtcaggagtaagagaccagcctggccaagatggtgaaaccctgtctctactatataaaaatacaaaaattagctgggcgtggtatcgcacgcctgtagtcccagctacccaggaagctgaagcacaaaaattgctcgaactcaggaggcagaggctgccgttagctgagatcgtgtcactgcactccagcctgggtgacagagtgagactctgtcaaataaataaataaatccagtgaaaagaaatgaagatgttatgttgcattctagctgggtctggagtttcttgcagagggctgtgaaccagaggcctgggtctgtggtgttggagggagaccctcaaatatcagggaggtgatcttcacgctgctgcccaaagaaactgcagggtttgggagtttctttggaactctcagctctgactgtgagtctcacttctgacaccagctgcgggtttgagggttcccgagggtttgacaattcactacaaggactcacggaactcaccgaatgctctcagactcacagttagggtttattatagtgaaaggaaacagatgaaagccagccgaggacagagacacatgcggaagcatccaggaatgtcccaagtgcaaagcttccagctgtctcctcccagcgctgtcttctgcgggcacccatgtgggacagtacacgcagagtgttgccaatcagggaaacccactcgagccttggcgtccagagtttttactggggctcagtcacatagacgtaattgaccacacgtgtggccgacattagtttccagcccctccaggggtggagctgatactgtgtggcccacattcctcaatggaaatcacactgttagaaatgatctggtgtggccctaggtccctatgtaaatagagacactcttatcaggcagaacattccaagggcttagagattaccttccaacagcaaggccagaagtcagccctttggggtaaaattaattccttactatagagactttctccctcatctcatttgatggattaagagatattcaaggccgggcgctgtggctcatgcctgtaatcccagcactttgggaggccgaggcaggtggatgacctgaggtcagaagttcgagaccagcatggccaacatggtgaaaccccatctctactaaaaatacaaaaaatagccaagcatggtggtgcatgctgtagtccagctactcaggaggctgaggcaggataatcgcttgaacccaagaggtggagctttcagtgagccgagatcacaccactgcactccagcctgggtgacagagtgagactccatctcaaaaacaaacaaacaaaacataagagatattcaaaggtgatttactttctgaccatgtgactcaacatgattttaccttgtttggggcctaaagccatgttgtgtgctaccacgtcagttcaggagaatacctgacagcttccttgcgcagaatagaggcggtactaactcaaggggggatgagtggggttggccctcggtgttctctcgccactcattctatcttccatggggtcgggatgaaaacgccaatactatgtttcccagatgcgctcaaagatgtggttttgggtgtggattcagctctgcgaattagaggccctcgcagaagacttggaagaccaaaagagaccatctttctgtgccatttgctgtttgctgtgagctcataggatggtgaaagtgttgagtttttttggctgtaccattccagtgtccagtcactagcctcgtaggtactaaaaggcagttatgctcataaaagaatatctaaattggccaggcgtggtggcttatgcttgtattctcagtactttggcaggccaaggcaggcggatcacctgaggtcaggagtttgagaccagccaggccaacatggcaaaactctatctctgctaaaatacaaaaattagccaggcgtggtgtagtcccagctgctcaggaggctgaggcaggagaatcgcttgagcctgggaggcggaggtttcagtgagcagagattgcgccattgtactccagcctgggcaacagagagagactccattttgaaagaaagaaagagagagagagaaagagagaaagaagaaaggaaggaaggaaggaaggaacgaaggaaggaacgaaggaaggaaggaagggaaagggaaatctaaatggccaataagcacatgaaaagatgttcaatatcaacagtcatcagtaaaaataaatgaaaatcacaatgagataccaccacacacccactaggatggctaaaattaaaaagacagacacttccaagtgggaagaggatgtggaacaagtggaatttccattcgtagctggaccagaaagggatacaatcactttagaaaactggcagtttctaggctggccacggtggctcacacctgtaatcccagcactttgggaggctgaagaccatctgaggtcaggagttcgagaccagcctggccaacatggtgaagccccgtctctactaaaaatacaaaaattagctggatgtggtggtgggtgcttgtaatcccagctacccggggggctgaggcaggaaaatcacttgaacccaggagacagaggttgcagtgagccgagatcagaccactgtactccagcctaggcaacagaacgagactcggtctcaaaaaaaaaaaaaagaaaagaaaagaaaattggcagtttcttaaaaaggtaaatgtgcacttaacctatgacccagctattcaactcttaagtatttatccaagagaagtcaaaccacatgtccacacaaagacccacacacaaatgtttacagcaatatctgtaatagtaaaaagactagaaacaaccccaatgtccatcagcacaagtgagtggactacaaactgtggaaggaagaaagactgagctacacaacacatgaatgaatctcaaaagcattgtcttgagtgaaagaaaccacacacgaaagagcacagactgtgtaattccatttatatgaagttctgaaatatgcaaaactgattaacagtgataaaaatcagaagagtagtggcctctactatgtcagcaggaggtggggagagactgcaaaggggcatgaaagaactttctggaaggattgaaatgttctgtgccctgatgacagtggtgcagattacatgtccatatattgatcagaatgatcaaattgtacgtttaagttttgagggctcggtgccgtggctcatgcctgtaatcacaacactttgagaggccaaggcaggtggatcacttgaggttggagttcgagaccagcctggccaacatggtgaaaccccgtctctactaaaaatacaaaaattagccaggcatggtggtgcatgcctgtaatcccagctcctcagaaggctgaagcaggagagtcgcctgaacgtgggaggcggaggttgcagtgagccgagatcgcgccactggactccagcctgggtgatggagcaagaccctgtctcaaaggaaaaaaaaaaaaaagatttgtacactttactatgtgtaagtgatatttggatgtgtgacccctccaaatctcatgttgaaatgtgatccccgatgatggaggggggcctggtgggaggtgattgggtcatgggggttgatccctcatgaatggcttggtgtcctccccatggtcatgcgtgagttcttgccctcttagctcacgtgacagctggttgcttaaagagcctggcacctccccctctctctgtcttactcctgctcttgccatgggacacgcctgctatcccttcacttcctgctatgagtaaaagattcctgaggtctcttcaccaaaagccaagcagatgctggtgctgtgcttgtacagcctgaagaaccatgagccaaagaattctcttttccttataaattactgtctcaagtattcttttatggcaatgcaaaatgaactaacacagtaaattataactcaatacaaaacaagaacattgaaaacaaataggcagttctgtcctgggtggtgatgattttctgatccctggatctcagacagagcagccagatgctgaagctgacgtgtacaatgggggctcctgattagggtggagggagaagctccttgggcaagtcagtctgctcatgttgtggaatcatttgcagtcttcacttagagcgcactccaccagcctttccaaagagcttgtcaacctctaattccttatgccaagccagaccaattttgcttaaaattgacagtcacaaataatctcaaaatctcgtggcttacaacaaaggtttgtttctcgctctcactacatgtccctcacggttcagctaggagctaggatgggacccaagatgatggggaagcctgggctgggcgcagtggctcacacctgtaatcccagcactttgggaggccgaggcaggcagatcgcttgatctcaggagtttgagaccaacctggccaatatggtgaaaccttgtctctacaaaaaatacaaaaattaggccaagtgcagtggcttacacctgtaatcccagcactttgggaggccgaggcaggcggattacctgaggtcaggagtttgagaccagcctggccaacatgtcaaaaccccatctctactaaaaatagaaagattagccaggcatggcggtgcatgcctgtaatcccagctactcaggaggctgaggcaggagaatcacttgaacctgagaggcggaggttgcagtgagccgagatcaagccactgcactccagcctgggtgacagagtgacagagtgacactccgtctcaaaaactaaataaaaataagctgggcatggtggcttgcgcctgtggtcccagctatttgaggggtgaggtggggggatcgcttgagcccaagagatggaggttgcagtgagctgagatcacgccactgcactccagagtgagaccctgtctaaaagaaaagaaaataaaagaaaagaaatgtttctggttatcatagcaggcagaaggcagaacaaggaacaaggtgagacacacactggctcttatagcctctgtcaggaagggacacacctcatttctgctcacattgtcattatcgaaagcaaatcacacgggcacatttgagttcaacagcacagaacattacaatcttcttataggaaggtatattaatccgttttcatgctgctgataaagacatatctgagattgggaaacttacaaaagaaagaactttattggatttacagttccacgtggctggggaggcctcaatcatggcagaaggtgaaaggcacgtctcacatggtggcagacaagagaagagagcttgtgcagggaaactcccctttttaaaaccctcagacctcatgagactcattcaccatcacaagaccagcaagagaaagacctgcccttatgattcaaccaccttccactgggcccctcccacaatatgtgaaaattcaagataagatttgggtgggggcacagccaaaccacatcagaagggaactgggtattgatgggcagtaatattgtttactgcaaaggacatttattatctcacatagcaagagttctagaggcagaaactgtattcagcttcaggagacagccagaaacaacgacttaaacaggttatttattcctctctcacatagcagaactctgaagtacatagtgcaaggctgggaaagaggatccctaatatcataagggaccagacttgctgctctgccaccctaagcatgtggcctgaagcctcaagatcacaaaatagctgcagaagcctcagccatcatgccacattccaggaaaaaaatcaagaaggggaaaaaaaagtgagaaaggaaaggcaccactaggtgattcagctccttttaaagggacttcccaagactccctcccaaagatttctacttccttcggattgctacctctaattgcaaaggacacagaaatgtggtcttttagctgagtccgtgacaccccaaataccatcaaggaaaataattgccctcaggaatttgttgattaggatgctgagaaggatggggagctgccaccaagtcaggagatggagcctcaagtcatttttactccaatgtaaaaggaaaagataactgttaagactgggggttggccaggcacagtggctcacacctgtaatctcaacactttgggaggccaaggcaggtggatcacctgaggtcaggagttcgaaaccagcctggccaacagggtgaaatcccatctctactaaaaatacaaaaattagccaggcatgtgacacatgcctgtaatcccagctactcgggaggctgaggcaagagaatcacttgaacctaggaggcggaggttgcagtgagccaagattgcaccattgcactccagcctgggtgacaagagtgagacgtcatctcaaaaaaaaaaaaaaaactggtcgtttttgaaacttccagaggacagcagcactgattctcagacttgatagagacttccagacatcacttcaacagcgcctccaatgctctccaatgctacccaatccctttctggcaaaagacatctttttctgtggcatcatggtctgaagtgaagcctcctcctcctccacccttacatcaggggagatatcttgccaggagctaatggagtggatgttgtaattcagctagcctcctgagtacaattctgtcaaggttcttgttttgaaattgaggccagatcacattaactggaaggaatctgccttttctcatctgacactagattgtgcttttcttggaggtgttgaggatgacctccaatgattgcttcggtaaagtctgttggcttctcaagaagttattgagtcaaggactccagctgctgatggtgggaggttaaacagggtttgaaacatcgcctgaggtggctttgtaatgtatcaccttggccaggttaaactacacttcccagaatctttttccctagatgcctgtgttttctggttagggtgaaccacaagagacattcttgtcagggatctgctgggtagaggtgaagccacggacatttcgcagcttataccagttgtcacttatcagacagctcatctcattggcataaggcagcaaccagggctgcaactgtttcaccttccgctggatcctccttcagcttccccagttgttgggccagacatgtgtgctcagccccgtgatgaaggaccatgactctagcaagacacccacagcaccaaggtcatagacaacaagaattagcatggggctgggtgcagtggctcatgcctgtaattccagcactctgggaggccgaggcgggtggatcacttgaggtcaggagttcgagaccagcctggtcaacatggtgaaactccatctttactaaaaatacaaaaattacccaggcgtgatgttgcatgcctgcaatcccagctactcgggaggctgaggcaagagaatctcttcaacctgggaagcagaggttgcagtgagcagagatcacaccactgcactccagcctggtcgaccgagtgaaactctgtctcaaaaagaaaaacaaaaagaaagaaagaaagaaaaaaaagaagagaaaagaaaaagaaaaagaattaacataggattcagtccatccttgtggactccagcttgtgcttgtgggttctaacttgttccgtgctctccccaatcttacctcaatcttcccttcctgacttcctgcacctgtgggtttcaagttccagcatcaagacaacagccctacaaagagagcttcactagcaactacaattgttgaaggtcaaattcgtgtagcaaactgtgtgtgtgtacgcccacatatgtattaaaggttcagctttgctgatacagaatttggtactaagagtggttccagaaggccagaatcttaacaatgagatctggtttttctttctcttttttttttttttttgagatggagtctcactctgtcacccaggctggagtgtggtggcgtgatcttggtttactgcaagttccgcctcccgggttcacgccattctcctgcctcagcctccccagcagctgggactacaggcgcctgccacaacgcccagctaattttattgtacttttagtagagacggggtttcaccgtatta[135 bp omitted]gccattaatgaccttgttttcagtaatgaagggtacactgataggtcatagcatggagtggcaaggcagtcactcagaccatcaccagtagcttcctatattaggtttctatagaaggaaaggctctgggtgactgagtatttgcttccacagaacagtttagtgaaaataagaagtgtaatggggttggctcattgctgctgactgtgctggaaaacttggagctgaggtggaatgatggcactcagaactttaccttcccagctctggttctgtataagggacttgaaagcttctgtgagtggtggccctgaaagaaacttgtatttcccatagtcatagggctgagatttctgaaaaccaaagctaaagtctaatccaacaaaagttgaacttctaacctcacagggtcttttttgttaaagttagggctttgattggggaggaatgggatcctgaaaattgggatggagacatatgagcagattccagtgaagctgaggactttaagacccctaaattctgccaaatctctttgcctgcagaggcagccctttcactcttgcctgcagaagtgagtctcctcttccctgaagaaattgtaatggccttccataaggcaaggcatctatgctcctcaggacctattcctatcacttcttacttctaagacctatgactagactcaaggctcaagagaatgtgaaaggtgaggtataaaatgtgacccatgagggggtgcaacacacacccaaataattgtcaatttatatcaacagagaactggggaatatgtgcagaaatggatcttaagggtgtggaatcaaggtggaagacaatatagttggatcaagtcaaatgtatttacattggcccaccaagcagagatgtaatgtttgagcttgaggggctaggaatggttctgacagtttgcttggttggctgattgatatatggacccgtacctgggcctataataggttgaaaatgccagaatttccttgggtgtactaaagagcatgaatcagcatatttttttttctgtaaaaagccatagagtaaatgttttaggttttacaggccagtctcagtttttcactcttcagctctcccattgtagcaataaagccatcaaggacaatttgtaagtaactgagcatggctgtgctccaatataagtttatttataaacactgaaatttgaatttgtatcattttcatgtgtcacaaatattatttttcttttgattttatttcaactaaaaaaatgtaaaaaccaattctattttgtgggccacacgaaaacagcccaggaattagatttgacccatggactgtcatttgacgattcctgctgtagtgaaaggtggccaaaggctcagagagattggaatgctggagtggctttatcatgtaagatttgctcatctatacacattgacagtgccaaggggacacgactttcatcctagctatcagaaataaatttgtgaaggagagtcctagcatccttgaagagctctgtggtggctcttctttgtaggtcagaaactctagtggaggtcattaagatggctgaccagaagtgcccaacactcagctgcgtagagtgtctaagagaaaacactggaattcagcaaagaagtgacaaaaccccagaatattgtgatggcagcatagacagggaagcaaagcacctgagcagtattggtgcagagccaagaggactccccattgcaggtaaaaggtaagtggggggtgccctgcagtccttgcagcaatcctagctataagagggcctcacggtcctcacaggcctgaagcccagtctagggagctgcctagaatccacatggctacactgccccagagaaaggactcacactgaggccccactcccaaagacccaggctgctaccacacagggctattttgagaacagagcccactgctagagggcattctgccttggatgccaatagctcctgcatctccacatccctggggtccttctgttattccaccatgtctacacaaaagggtgcaatgccacaacaccagttagatccagaagtacagctatgaccccagcatttgaactcatacagtgccccacaccccagggaacaggcaatctatcacagcagggtggcagcccccaaaacatggggaaccaatgtgcaaatccctcagggaccaaggacttgcctgcctggtgcccaacagtgatggcaatgctgcctcacaactagcagagccaccatgcccagtgcacacttccctagggttcacccagctccttcctccagcaaagccacaccactgcctccttaaacacctgaatattaggccactgaagtattcacagacactgctgacattaattacagccaaagaaatcacatggagatcatactactgtgtttatctagaaccacagccaaagcatcctacacaaccgacactatagggtacatatacaggaaaaagtctttacttatgaaagttactccatcaaattggaagaggtagctattataccagatgtgtaggaacacaagaaacatgaaaaagcaagaaaacatgacacctctaaaggaacacaataatcctccaataatagaccccaaagaaaagaacatctgtgcaattcccaaaaaagaattcaagtgatcataaggaaatttgatgggata[132 bp omitted]ctggccaacatggcaaaaccatgtctctactaaaaatacaaaaactagccaggcatgatggtgcatgcctatagtcccagctacttgggaggctgaggcagaagaatcgtttgaaccctggaggcggaggttgcagtgagccaaggtcgtgccaccgtactccagcctgggcaacagagtgagacaacatcccccgcccaaaaaaatcaggaaaacagttcatgatcagaatgaaaaaaaatcagtaaagagatggatatcataaaaaaaaacacataaattttggagctgaagacttaataaatgatttttttttttttttttttgaaacagagtcttgctcttgtcacccaggctggagtgcaatggcatgatcttggctcactgcaacctctgcctcccaggttcaagcaattcttctgccccaacctactgagtagctgggattacaggcccctgccaccatgcccagctaatttttgtatttttagtagagacggggtttcgccatgttggccaggctggtctcgaactcctgacctggtgatctgcccacctcagcctcccaaagtgctagaattacaggcgtgagccaccgatcccggccaataaatgaaatttaaaatataattgagagcttcaacaacaaactaggtcaagcagaagaaagaatttctaaacttgaagacaggtctcttttgaaataactcaatcagacaaaaaataaaataaaaaagaatgaaggaagcctacaagacctatgggacattgttaagcaaacagatattccaatttccaaaaggaaaagagatgagaaaagacacagaaatcctatgtaataaagtaatagctgagaacttccaaagtctcgggaaaggtatggacatccagattcaggatgctcaaaagtccccaaatagattcaacccaaaaaggtcctctctgtagcacattctggtcaaactgtcaaaagttgaagaccatgagggaatttgaaaaacagcaagagaaaagcatcaagtcacatataagggaatccccattagactaatagaagacttctcagcagaaaccttatattacaggagcgaatgggatgatatattctaagtgatgaaagaaaaaaacctggcagccaagaatactgtaacagcaaatctatcctttagaaatgaaggagtcataaagtctttcccagacaagcaaaaactgagggaatttattaccactaaagtagccttacaagaaatcctcaaggagtagtaaatcagcaaattatctgaataggcatttctcaaaagaagacatacaaatgaccaacaagtatatatgaaaaatattcaacatcattaatcatctggcaaatgcaaattgatactacaataagatatcatctcactccacttagaatggctgttatcaaagagaaaaaataacaaaagctggcaaggatgcagaggaaaaggaactcttatacactgttggtggaaatgtaaattagtacaatcatactggaaaacagtatggaggctccttaaaaacacctaaaaatagaactatcctatctatgatccagcaatacactctagggtatatattcagaggacaggaaatgagtatgtcaaagagatatctgtacttatatgccaaagataaggtaagcatggttactatagttgatagtgaagtcaaaatagtaataagaataatgtgactcaaagagacctttggcattcactactttatcatggtatgcctcgaaatgaaatagatgggggagcctactaaactcttgcttgatctgtctaggtgggtaagttctgagtctggcagacttgcagcaccattctcaatagccaagatatggaatcaacgtaagtgtttttcaagagatgaatggataaagaaaatgtggtacagatacacaatggaatactattccaccgtaaaaataatgaaatcttgtcatttgtggcaacattaatgagcctgtaagacattatgttaggtgaattaagccaagcatgggaagataaataccacatattctcattcatatgtggaagctaagaaagttgatatcatagaagtagagaatgtaatagtggttactagaggctggataggggttgaaggggataggaagatgttggcaaatggatacacaattacagctagataggaaaaataacttccagcattccttagcactgtaggatgactataattagcaatgatttattgcaccattcctcaggacaatcaaccagtctgctgatggctaattaattacgtcgaactgtctcttttttaattttcttttcttttttgagacagagtctcgctcttgtcacctaggcttgagtgcaatggaacaatctcggctcattgcaacctccacctcccaggttcaagagattctcctgcctcagcctcctgagtagctgggattataggcatccatcaccacacccagctaattttcatatttttagtgaagacagggtttcatcatgttggccaggctggtctcaaactgctgacctcaggtgttccacccatcgcagcctcccaaaatgttgggattacaggtgtgagccactgcgcccagccacattgaactgttcctgtcatggaaagggcaactcttttttcttattttaattttttaatttttgtaatagaattcgcttaccatacaattcacatgccatacagttcacacatttaaagcatacaagccgatctgattatttcacattgcatgcctgtatcaaaacatctcatgttctccataaataaatacacctatgatgtacccacagcaattaaaaatttttaaaaatcatgtacaagtcaatggtttttagtatatccatagatatgtacagccatcatcacgatcaatttaaaaacattttttttttttgagagagagtcttgctctgtcacccaggctggagtgcagtggcatgatcacggctcactgcaaacttggcctcccgggtttacgcctttctcctgcctcagcctcccgagtagctgggactacaggtgcccgccaccacgcccagctaattttttgtatttttagtagagccgggatttcaccatgttagccaggattgtctcgatctcctgacctcgtgatccacctgcctcggcctcccaaagcgctgggattacaggtgtgagccaccgtgcccagaccaattttaaaatatttttatcacccccacaaaagaaacccaatgctccatagctattttcctcctgttcccaaatgtctcagccctaagcaaccactagtctactctctgtctctatatattttcctattttggacatttcatataaatgtattcatataatatgtggtgtcttgtgattggcttctttcactgaatgtaatgtcttcaaggttcatccgcatcatagcatgtatcagtactatgttcctttctatggctgaataatatttcattgtgtggatttaccacatattggggttttttttgtttttttttttacagaccccgcccccccaaatattgtttatgcctccatcagtttgtagatatttggttttgttttcaccttttggctattatgaataatatgaaaataaacttatgtatttgttattatgtggacataagttttcatttctcttaggaataaaattgctgggtcaaatggtgactgcatttttaacagtttgaggaactactggactgttttccatagtggctgcagtgatgaggtgtggtggctcacgcctgtgatcccagcattttgggaggccgaggggggcagatcatctaaggtcaggagtacgagaccagcctggccaacatggcgaaaccccgtctctactaaaaatacaaaaattagcctggcgtgctggcaggcacctctaatcccaactactcgggaacctgaggcaagataatccccttgaacctgggaggcagaggttgcagtgaaccgagatcacactgctgcattccagcctgggcaacagagggagactctgtctcaaaagaaaaaaaaagttttgttgaactaactcatgaagccatctggtttaagacttttctgtgtccattaaaatgatcatgtggttttgtaatttattctgttgatatggtgtattacactaattttcagatgtgaagccactgttacattcctggaataagtcccacttggtcgtggtctataacactttttatatgtctctggatttagtttgctagtattgtgttaaggatatttgcatttatatttataagagatatttgtctgtagttttcttgtgtctttctctggtttttgtactggggtaatactggtcccaaataatccactggaaagcgttgcctcctttttttaatttttgcaagagtttgagaagaattggtattagctcttctttaaatttttagaaaaatctgccagtgaagctatctggttcttggtgtgtgtgtgtgtgtgtgtgtgtgtgtgtgtgtgtatgtgtgtgtgtgtctttggtcattaattcaatctctttacttattagaggactattcaaattgtctgatttctcttgaatcagtttcagtagtatatgtcttctaataatttatttcaactgggcgcagtggctcacgccagtcccaacactttgaaaggccaaggcaggtggatcacttgaggtcaggagttcgagaccagcctggccaacatggtgaaaccccatttctgctaaaaatacaaaaattagccaggcatggtggtgggtacctgtaatcccagctactttggaggctgagcaggataatcgcttgaatccgggaggctgaggttgcagtgagccaaaatcacaccactgcactccatcctgggcgacagagcaagacttcatc[131 bp omitted]agcctggccaacatagtgaaaccctgtctctactaaaaatacaaaaaaattagccaagagtggtggcgggcgcctgtagtcccagctatttgggaggctgaggcaggagaatcgcttgaacccaggaggtggagattgcagatcgccaccatgcctggctaatttttgtatttttagtagagacagggtttcgccatgttggccaggctggtctcgaactcctgacctcaggtgatcctctcacctgaacctcccaaagttctatgattacaggcatgagccactgtgcccagccgcatgattttgattttaattttaaaatcaaaattttatacagatttgttttgttgcctagtgcaggttctatcctacagaatattctccgtgcagtcgagaagattgtgtattctgcttttgttgggagaagtgtgctatagttgtctgttatatctggttgattaatactgttcagatcttccattttcttgttgattttatgcctagttgttctatccattattggaagtgaggtactgaagtctccaactattattgtggatttgttcatttctctattcatttttattagtttttgctttatgtattttggtgctttattattagatgtatatgtgtttatattgttatatattctgatggactgaccgccttatcattatacaatgcttctctttatctgtaataacttttttgttacaaagcttattttttctgacgttagtattgccactccagctttcttgtagtcactgcatgatatattgatatattgtctttcatcattttactttacatttttgaatcttacatgtttttcctatagatagcttttggctgtatcttggtttttaaaaaaaatctagtctgaaatatttgacttttaattgaattgttcatttcatcaacatttaatgttattatttatacaattggatttacatctgccatattagcttgtgtttcctacaaaatttctttattagtgccaggggttttttgttttatttattgattgattttatatttattgagattttctacataaacaatcatttcaactggggatgggaacagttttattttttccttcccaatctatatgcctcttacttccatttcttgacttattacactggctaagactttcaatatgatgttgaatagaaatggtgaacatgcttgtcttgttcccaatcttaagaaagaaagcattcatttttcactgtttggtatgatattagctgtaggctttttgatgctctttatcaggttgatgaagttctcttctattcctagtttgctaggattattttttgcaaaacaaaacaaaacatgtatgagtgttttattttgtcaatactttgtctgcacctattgatataatcatgatttttcttctttagatggttaatatggtaatagtgattgattttaaaaaattggaccattgttgcattcttagtataaatcccatttggtcatagtttattgtatttattcatttattattattattattttgagacagagtttcactcttgttgcccaggctggagtgcaatggcaggatctcggctcaccccaacctctgcctcctgggttcaagtgattctcctgcctcatcctcctaagtagctgggattacaggctgtgcaccaccatgcctggctaattttgtatttttagtagagatgagttttctccatgttggtcagtctggtcttgaactcctgatctcaggtgatccgcccacctcagactcccaaagtgctgggattacaggtgtgagccaccgcgcccggccggtcatagtttactactcattttacatattgccgagttcaatttgctaacattttattgagtatttttgcatctatattcatgaggagtattttagttgtgtttattattattttttgtactgtctatctggtttgtcatcagggtaatgctggcttcataacatgagttggagagtatttctccttttgtattttctggaagaaattatgaagaattagtgctatttcttctttaaattacttatttaaaaccattgaaaccacctgggccaggagattttttaaaatggcattaactatacatgcaatttatttaatagttactagactattcatattatctatttcaacagtggtgaatgtagtagctggtagtttttgagaaattggtccatttcatctaaattttgatatttatgtgtatagagttattactgatattcctttataagctttttaataattatagggtctgtggtgatagctgtcctctttctaccctaatattgataatccctcccttctctctcttctctctttatctctacctctatctctttctctcccttcttctctcctcagtcttgttagaggtttatcaattttactgatcttttcaaagaaacagcttttggttttactgatttcttctattgcttttttgttttcattgatttttgcacttattttttccttgctcttcatttgggtttattttgctcttcattttctaatttcctatggtgaaaacttagattattgacttgagatctttcttcttttctaatataatcaacatttaagactatacatttttatataagcacttctttaacagaattccacaaattttgataggtttcttactttctttcagctacaaatatttcctaattccctttggaatgtcctatttttcaaatgattaaagattgtcctgttatcttcctgttattgatttctagtttaatgctggccaggtatggtggctcatgcctgttatctcagcactttgggatgccagagcaggaggatcacttgaggcaaggagttcaagaccaacctgggcaacatagcaagacctcatctctacaaaaaatttcacgtgagcccagaagtttgaggtttcagtgagctatgattgtgctattgcactccagcctgggtgacagagtgagactatgtctcaaaaaaaaaaaagttctaaacggtcaaagaacatacttcatatgatttcaaattttttcaactttttaacttctgtttcatgactcacaattccatttgtcacggtgagtgttccatgtgcatgtaaaaaggctgcttattctgctattttggggggagatgttccataaatattgattaaagccatttggttgatgggtaagttctatgtctgtgatgtataacttctatatccttaattttctctctactaattatatttattactgagaggggaatgttggtctctaactacagttgtagaattatttattctctttcctgtcttgtcagttttcactttgtgtgttgttttttttttccaggaaagaaaaataaaatggtttttaataccatatatggatatttcattcttgggaatggtgctgtgcaattactgtgcatgaaatcagattattcaagaaagctggtttttaaatactagtgtaattgccccaaaaaaggcccaacaagacctgcagcctgtttcatgcatgcaacatttaatctaacagcttcatcagccctctctctgcttgtcacggctttgcgtattttgaagctctgttaggttaatacatcataattgacccttttatcaatatgaaatgcttctctttactcctggtaatttttttctctgaactttaatttgtctgatataaatataacaactccagctttcttttgattaattttacaggtatatcttttttcactcttttacttttaatctacaaatttccttaaatttaaagagtttcttgttgagagcatatagttaagtgaattttttaatctattctcataatctcttttaattcatatatttagaccatttacatttaatgtaataattgatatgtttgggttgggtataccattttatcatgtgttttctatttgtttcatttattttttattttattttttttctgagatggagtcttgctctgttttccaggctggagtgcagtggcatgatctcagctcactgcaacctccgcctcctgggtttaagcaattctcctgcctcagcctcctgagtagctgggattacagacacccaccaccacaccctgctaatttttgtatttttagtagagatgaggtttcaccatgttagccaggctggtctcgaactcctgacctcatgatctgcctgcctcagccccccaaagtgctaggattacaggtatgaaccactgtgcccagcctattttgtttttgttcctctctttttcctttcctgacattttttttgcttatttgaacatagtttagtcttccattttaagttatcaattatgatttttactataactatttgtataagttttagtggtaactctagggattacaaaatgcacactgaactttttacactgtatttagaaacaatattttatcactcaaaactttagcactagtaggtctcttaattctcccccttatgttatacttgtcatgtattacatacacattcatgaaaattccatggccaatgttatagttttttttttttccaactgtaaaacagattttaaggaactcaagaggagaatagcctattatatttacccaggtagttattacttctgttgttcctcctttattcctgatgttccaagtttccttccggtatcatttcccttctgtctgaagcaattcctttagcaatgttttttacagcatttccgctgggtatgaattttcttagttttacttaatctaagaatgtctttatttcgcctttattcctgaaagttattttcactggagatagaattccagattgacacttattttctttcagcactttaagaatattaggccatttccttctggcttccatggtttctgctgagaaatatgccatcatttgaattattcacatgtattggcttgttgggttttttttcttttctttttttttttttttttcttctttcaagatattttcttcatatttaatttttagcagtttaattatgatttgtctgtgcatggatttctgtgggtttatcctatttggggttcacttagctccttgaatctgcaggtttaagtctgtatatagggaaaacaaactgtttttcctcttctatactcaccctcagcactcaacacttctgatgccagatgtgtggggttccttccccccccaaacaagcaattctcctatggcagttgggagtcctacaattcaattcagttctaacactatttacctagagacagtgtcagatcccaaaagttaagggctcagtcccgtaagactgcatcccacttcagatgtcaatcataagtgatagattcccaggttatccacaacttctgtctgacttggctacaaattacaggttcacaagatcctttacttgggttcagtcatttgctagaatggctcacagaacccactctgtatgctgaaactgagaattaacttgattaagcccactgaacttaaactgccttacttacttttaattccttacttctagttaatcttaataactatatagctaaaagtcatgtaactaagcaatctactatcttccttatagataatatctctgatgtataggtcaccatggtaacagttgcttaaagttatttttcatgaatttggggtcagctcttgtccagttcaagccgcttgagaccacttcacctgggcctgcgtgaatgtccaagaggtgagcttctgacaccagagggccataaagatcttcctacagatcatactaacgccaccattttctaaacatgcttcctatgaagagccatgaggcttgactatgtgtgtgcagattgccaattacctcactttttcttatcccaattccctttctccacacctcagaccactctgcttctttatctcataaatatccctaaatcccatctttggggaggcagatttgagacccattcacccacctcctcacttggctgtctcatgaacaaaccctttattttttgcaaaacctttcgccacagtgattggcttattgagtgcaggcaaaatgaaccttgctcagtatcagtatttacccacttgttacaaagaatccaaatcaggaacagccggatggaagatgcatagggcaagatatgagggaaggggtgcagagcttcatgtcctgtccagctgtacctgcctcctagcatttccacttgttcagcaacccagaagctctcagaaccctatctgttagggttttggtggaaagcttcattacataggcatgattgattgcatcgttggcctttggtgatgaactctaccttcactccccgtcccgctccccagagatggaggtggggtgtggctagaagttctagcccactcatcacgtgtttggttctctgggcaaggagacctcattctgaagctgtcctggatcccccaaccatcagtcatctcattagcatacaaaaatatttcagttgttttaggagcagtgtgtcaggaagtgggggaaggcatagaccaaaatttatttcttggccgggtgcggtggctcatgcctgtaatcccagcagtttgggaggccgaggcggatggatcatttgaggtcaggagttggagaccagcctggccaacatggtgaaaccccgtctctactaaaaatacaaaaattagccaggcatggtggcgcatgcctgtaatcccagctactcgggaggctaagacagtagaatcgctggaacccaggaggcagaggtttcagtggcaccactgcactccagcctgggcgacagagctagactctctcaaaaaaaaaaaaaaaaaaattacttcttattatgtcacaatggcttttgctaaacttgagatgttttctgtcattatttcttcaaaatatttttcagcaccgcactttcctctggcctctgggatacaaatgttagacctttgtggttgtcccacaggttcctaaggcactgttcaatttttttttttaagtcttttttctttctactatacagatttggttatttttattgttgtatctttatgttgactgactctcttctcccatctccattttgttattgagcccattcgatgaatattttattttggttatagtgtttttcagttgcacaatttccatttgtttcttcttcatgtgttttatttccttgctgatatctttaatatttgttttaagagtttttttatataattgcaaagtttacatcattgcaatagcatgaattgattgtcttttcccatgagagttaagaattttggtatcctttgtatgccaagtaattttggactgcatcctgcacattttgaacattatattatgacactctgagtcttgtttaaatcctattgagaatattgatggttttgttttagtggccagttaacctgggtaaattcagactgctaagttcctacttgccttctatgccctgtagttccaatgtcagttcagtttttgaagcatttgcaatgctattctgatctatcttccaaatgtgtcatccagtggtcagtctgggccctgggcagaagtctaatcattagctcagtttccagtctgcggcatgctaattagggccagatgagtccatgagttcataaataactttatggggtgactttctcaagcccttccctctctgttatcttccgatactttctggttccctgggctcccctttctgatcctccagacagaaactgcccaatttcatgattgtgccaggtctaggatcaagaggttggagaacagagagggagaaaaaaaagcaatggagtctgatcctttccactgaatggagagaaaagtcctttcctgaatttttggcttctgccagctgctctgctactgcaatgggattgctcgaaagaaaacagaaaagggggagaaaataaattctccccactctctctgaactttaggagtaccctttcctgctccttcagccaggcctctcctaggtttctccctgtctgcaccacagtgctcatttccaagttttggactgtattgagttcaggtcaggggatacaggaggaaaataatatagtaaactcatcattgatttggtggcactttgaatttttgtgttcctttcccaatgcaactgttgtaactgactttccaaaattgtcaaatagctgggccatgtattctgtctggattttctagttgtgttcagtggaaaagaaagtgtagcacgtgtttactccttcttgcctgggtttactacttctttcccagaactggaacttgaaatggacttttgaagatttggtttcagtgtcatctgtcttagtctattcaggctgctctagcaaaaataccataaactgggtggcttaaacactggaaatttattgctcacagttctggaggctggtaagtccaagattaaggtaccagaagattcggtgtctggtgagggcttactctccggttcataaacagtcccttctcactgtgtcttcacatggtagaaggagcaaagtatctctcttgagtcttcttcacaacagcactaatctcattcatgagggatcttccctcatgacctaatcatcctcccaaaggctccacctcctaatactatcacctcagggattagaatttcaacatatgaggccgggtgcagtgactcacacctgtaatgccagtactttgggaggccgaggcaggcagatcacttgaggtaaggagttcgagaccagcctggccaacgtggtgaaaccctgtctctactaaaatacaaaaattagctgggtgtggtggtgcgcacctgtagtcccagctactcaggaggctgaggtgggaggatcgcttgaactcaggaggtggaggttgcagtgagctgagatcatgccaccacactctgggtgacagagcgaggctctgaaaaaaaaaaattcaacatatgaatttggcagggaggacacagacattcagatcatagcataatctatatggcaacacctgtggggctggagcaatgtcctctaggatgtggtatgtgccctaaatcaatgactaatatatggtgctgtctttccccaggcaggattcatgggttcccaacacaaagggatgaaaataggattggattttctcattatttcccctagtgatccactatcaaaatttttgctacctcccacaactctaggttcttctggtctagaggtcctatttccaaagggagtgatgcttccaccagcagacacaacaatgattccagtgaactggaagttgagactgccccctggctactttgggctcctcatgccactgaatcaacaggccacaggggaggtcactgtactggccaaggcaattaattctgagtatcaaagggaaattgagtataaagagtatgtctggaatacagaatatggtctagggtgtctcttagtactatcatgtcttgtgattgaagtcaatggaaaactactgcaactcaattgagacagggctgctaatggctcaggtccttccgaagtgagggtttaggtcaccctaccaggcaaagatccaaccagatgaggtagttgctgagggcaaagcgaatatggaataggtaatgggaaaggtaactgtaaacataattataaatgccagccatgattatgtgtccagaaataaaaaactgtagtagtgtaaaccaaaactaaaatcctaaaccccccaaacaactgaacacaccccctcttggctgagggggatcacagagaaacctgaaacactgaattcccggccatgacaggaagggaggtcagacgtgcctcatttcagcccctccattttgagaagttaggcacaactgaccagcattaatattaaaatggggccagatatatgtgttttgccccatgataaaggaccctggctccaccaggatacccacaccaccaaggttggaggcaacaagaactgaaatggggctgggcgcagtggctcatgcctgtaatcccagcactttgggagtccaaggtgggaggatcacttgaagccaggaatttgagaccagcctgggaaacacagcaagaccccatttctacaaaaaattttgaaaaattagccaggtgtggttgtgcacacctggcatcccagctgtttgggaggctgaggcaggaggattgcttgagctcgggaggtcaaggctacggtgagctatgatcatgccactgcactccagtgtaggtgacagactgtaatcctgtctcaaaaatataaaaaataaaataaataaaatttacaaaagaactcacatggggtttggtttgtccttgtggactccggcttatgcatgttggttccatcttgttctttgctctccccaacctttcctccatcttcccttcctgacttcctgcacctatggggttcagttccagcatctgactcaaagataacaacctgacagagaccatttagccagctccctaaattgcataagatcaaatccagtaacaagtccttttgtagcagctaatcagtctataggtatatcttagtggtgcttcagccccccacctgtgattcaatcctgactgatccaggcaccaaattctagccacttcacaaccagagcctggaatatgtgtatgaccccttaagaataggagagctggctggaggagagcttctgttattatctgactgaagtctcaattaaaaaaagaaatgcaaggatggaatttcacaggaaagtagaagaaccccagacaggagggctgcaaagagaaggctgttggagggaggctgagaagagaaaaagggagcaggagagagtagcttgcacttcagacacctccttttccaagcctagggggggcaagaaaggtgggtaaagtcacatccttgagccctccaagaagagatctgcatgactataggcgacatatgttgctgcaccctgcttagctaccattttctcctctttgggtcacagcactcctgttttcctttagggcgcacttctacccatgttcagcccctatgatttaagtaagatgcgatcccctctccaagctctagaaatggacatatgtcccaggcctgggaaatgggaatctatgtaaccctggtgactgttcttggttctgggacagattcatggtcacactgaactgagacccaattctaggacgtttgctgatcctctgtctgggttgctcagatggtagaatgtgaacctggagctgctggtggccactgtttcccccagaagggaggagtcagtttgagaatgaggtcaacacagaggcacattgaactggcagaagggacagggagacactcctcatgtcatcctttgagcacctggatacaactatgtctgaagctaaatatagctggactttttagttatgtgtaccattaagttccatctttgtcattgttattgttgtctttctaattaagtcaatttgaaatcggggttctggcactagcaacagagtaaaaactaataaactgacctttcagtaaaagaatttgttaacgcccatctcatatctcaggtgtgtttgatttgggggaagagcagggaggctggaaatactattaccgatggtagctaactttgtcgaggacttactatgcaccagatgctcttcaaacactatacacattgtaccttataatcctcaaaacaaccctatgaggtggctactaaaattgccccccgttttatttatttattttttgagacagagtctcactcttgtcgcccaggctggactgcagtggtgcgatcttggctctttgcaacctctgcctcccgggttcaagtgattctccttcctcagcctcctgagtagctgggattataggcacccgccaccatgcccggctaattttgtatttttagtagagacgggatttcaccatgttggccaggctagtctcaaactcctgacctcaagtgatctgcccgcctcggcctcccaaagtgctgggattacaggtgtgagcctccgtgcccagctgcccccagttttagatgatcagtttagtttagatcagagagcttaggcagccacctcaaggttatacaacaagcaagaagcattgttaggaagggagtgtccaccgcttcctgacaatagtggctgagatgacttcccgggcatgggaatgggagagggagacattgaatcccccaatttggacccgtccaggttatctaagcacaacctcttgcaatgctgaatgggaggggtcctgcctctggctagtcaggaaagaccttctttattttgggctagaagtgccccctcataattgccacctaacagtcctcctgccctctgtggtcacaggtaagtggagctctgtttctctcactgtaagactagcagatgctagaagcagctgtgccctttcaccgccaacccctggtttcttcgattgttacttggaggctttcctggctgccctcaaagtatcttcttggtgtgggctgattagctcccaccttaattacctcctgacatcacctcaaagctcactttaggctgaagaaaaactataaagtaaatgcttcttattttactgccagtgaaatgatgagcttttcagtgctgtggatttttttttttcttatcatgttcacgtctgacctttcagaggctgacttctaaaatgcaggttagcaaaagtcatgtcaggaggagatggagatgtctcctctcctctgcatctgtgaagaggacagtgagtgcaatctgcaccataaatctagtttgcagaatccgataggacgaggtgtaaaagagggcatggcaatgcgggagtagctttgtgagaattgctctttgcataaaaaccagaggcctcgtgctgcctcagatcccgcgtggccgggatgctcacatctgcagcctggtatctccatctctcactctgctgctacatcctctccactccagctatgctgtgcagactcaccatcctctctcagcactggtcttttgtacacactattccttctcattgaaatactgttccccgcattctttgtctagttaaatcccctcatcctttaagtctctgctcaaacttcgtgtccttggagaagccttgttcgaattccttctgttatcttctctcatgaattcctatacttctccttcatagcaggtgtatagaacatagcacacataaggcacgtgtttatatgtgtttttgtggttgagtaaagtgtgcccccgtccttttaggacagcctgtgccagggcagggaccaggtcttggtcactgctgactagcagtgtgctcataaaggtttgacaacccttgtaggggctgggggatgctgacttatagagttgctgattccgtagtataaatcttccaccacgactgatttcaagctaccaatgtgagttcaaccataactcctgaaaaacttaacaaagggctcttgtgagttgggataaactggcttcagcacataatatggtttggctgtgtccccacctaaatctcatcttgaattgtagttcccataatccccatgtgtcagggggaggaacgcagtgggaggtaactgaatcatggaggaggttaccctcatgctgttctcatgatagcgagtgtgttctcatgagatttgatggttttataaggggcttttccccctttggctcagcacttctctctcttgcaccaggtgaagaagaacatgtttgctttcccttccaccatgattgtaagtttcctgaggtctccctagccatgctgaactgtgagtcaattaaacctcttttctttataaattacccagtctccggtacgtctttttttttttttttttttttttgagagagagtctcgctctgttgcccaggctggaatgcagtggcgcaatctcagctcactgcaagctccgcctcccaggttcatgccattctccttcctcagcctcccgagtagctgggactacaggcatccgccaccatgcccgtctaattttttgtatttttagtagagacagggtttcacaatgttagccaggatggtctcggtctcctgatctcatgatcttcccgcctcggcctccccgaggattacaggcgtgagccactgcacccagccttcaggtatgtctttattagcagtgtgagaacagattaatacagcacgccactgctgctgaccctccaacacctggtacagatttgtggaatgaatgaatgaagttaggcccagaaagcagagcctcctctgcctgtgcctatccatggtatactctccatctgtctgctgtagaaattagctttaagcaaaagtacagcattttctatcaagtaaaatacattcagtgtaatgcaaaggaatattctatgagtaaaactttcccattttcccctggtgttaaaacatactttctagtgtgtaattagagctttgcatgctgtgagtagtgactcgttagtggttcatgagatcaatttagaaggtcctaaccagcaatttttttctgaaatggaattaagtagaagaaaaaagaaatttcagagtatcagagtttgtctccagccttaagtaagtgttactttggtaaactcttattgtgagtgtgtattgttgacagaaaagccaaactttgtgaaatatttaaagaggtttattctgagcctataagagtggccatggcctggggtacagtctcaagagatcctgagaacatgtgcctgagggggtcaggttacagtttggttttatacattttagggagacaggagttacaggcaaagacataaatcaatacacggaaggtgtacattggttcagcctaaagaggtgggatatcttgagtcagagggtggggaacagggcttacaggcggattcaaagactttctgattgccatttggttggaagagttaagctttgcctaaagactgaagaagtccttagaaaagaatgcttgagctaacataaggggttgtagaagacaaggcccttgttatgcagatgaagtctcctaagtggcagcgctcagagaacatgtgaccagggtcagcttggaatttgggatctgattgccataaagagtctactctgtcagtcctgtgatctgtattttaatgttaatgttggtcagttgggcctaaactccagaagggaggggctagaatgaggcatgtgcacctcccatttcttcatggctagaattcagttgttcagatgtctctggggtccctttggcccagaagggggtccacttagttagttggggggctcaggattttatttttggttcaaagtatatattctaggttgtgatgtcaaatgactctcttacagttaacaacaaaagtgtgaaagctactgtggttgatagcaatatcctttggtttagtagctttgttttattttccatgttattacttggaaattcttttcccctggaccctcctaagtctctgtctcctatcccccagagacctaaagggtgaagacactgagcttccagatttgagggcaggagagtcctagtgaggcctggcttggaggccagggaacttcctattccagtctgcaatgttacccttcaatctccagctcccctggctgttggtgcccaccccagagttgtggaagccctttcagtctagctgccccacttggtgacagcatgggcagggcaggacagggagcatcatggggttcatgctttctgccgtccagcctccctacatgcagggcgatggcccctagctgacccttgagagctgaggggaggctaggaagagggttaaaggcgaagccagacccaggccattactgaagtcacatggcctgccaggaaacccctgtctatattgtagctggttgaactaattatattataaatacttttccattttctgcctagaaccatgctctagacatctgcatgaggtcattaaacctgcaccacagccatgcacacacacgtgtgtgtgtgtgtgtgtgtgtaaaagacagacatgaggtatagaagagcaatatagaggtctccatattatgggggaacagacagtcccagagcagggaggtcacttgaacagggtcacagaggcaggaggccacgaacctggctggacactgcagggccaagcaggtaaacactgtgcctgactcgcacccagacttcgcaacaaccctagaatattcataagtcagtaataatagtgttacaggaaaggagtcccgatccagaccccaagagagggttcttggattcccacaagagagaattcagggcaggtccataaagtgaaagcaagtttattaggaaaataaaggaataaagaatggctactccatagacagagcagccccgaggactgctggttgcccatttttatggttatttcttgatgatatgctacacaaggggtggattattcatttctcccctttttagaccatagagggtaacttcccgacatcgccatggtatttgtaaactgtcatggcgctggtgggagtgtagcagtgaggacgaccagaggtcactctcgtggccatcttggttttgatgggtattatctggcttctttattgcatcctgttttatcagcaaggtctttatgacctgcatcttgtgttgacctcctatctcaccctgtgactcagaatgccttaaccatctggggatgcagcccagtaagtctcagcctcattttacctggcccctactcaagatggggttgctctggttcaaacgcctctgacagggtgacaactgtgaccacaacagattcacaaacatgacattttcagagagaggaaggtatgcagggtggtgtgatttggaagaggctgtgggcgtagagggatgggtaattcagttggggtggtcagggagggctgcttggtggaggggactcttggctgagacctgagggctgtgaagttcttagagaagggtgttccaggcagagggaacagcaagcacaaaggcctgagacgagagctagcttggtatgcaagaggaacagaaaagaggaagtgagagtaaggcgggggagggaaggggcagggaatggaggctgtggagaggggagggtttccaggcagcccaggaccctcaaggagagaaacgttggatgtagtctcccaggtagggtccatctggcccttcctcctggctcctgcggagtccgagtggctctttccctccttccctcctctcccctcctccttctctccctctccattttccctgcaaggtctgcagcccaactccagctctcccattactacaggggctggtgggtccttctgagcaagaagatggggctctttgtctacagtgtctgtctatagtcattcacccactcattcatttaatcattcactcattcattcattcatttagccactcatttgtcaaatattgatttttctcaggtgttttgccctcacaggtcctgccgcctaaaacactgacttcttatctctcaaggctttgctttcaacactgtctcttccaagacctctccctgaccactcccaacttactaaacccctatcaccctgttagcttttgaatgctcttcatggtaaaacaggacaggttgatgctctccggggctctctctacacacaagagagagattagcctgacgggcattcgtttacccttctcattttctttgggaaccagcctcccctgctcttagtctatgtgattcggacacagccaactacatttcccagatccagaaatgaacacgccattccaagtaaagccaatgagagacagctgcaggacttttgctggaactattgggaaagtggtgtttctttttctgctatggttacttatctgctatgctctaagcctggaactgctggaggtcatctttgctgcatgaaaatgaagtcaatattgaggacagcagaggtgagagggagagaggcataatcctgagtgtattgcaggggcacctggatccagccatacctgaaatccgagactttccattctaagaaccaatacattctctttgtacttaagctagtttgggttttaatcacttgtgccagaaggcctgattgataataaaacctcaaagataagcaggcagtcaagcttaggtactttccttttaagagatgcgggcaggtgcttccttctctcagaaaccactcctcctctaggaccttctattctaagaagcctgggtgtttgaggttcgttcatcctgaggcataaaaacaagatcaaagtgccaggccagacggaggcagagtgtctacagaagcagccgtgcaactagcagcaggaattgggaatctgcattattaataagcaagcccattttcctttacttctttgtaagcagagccttaattttattagcctgtttattagctctgaccatgtgttcagaaaaagtaccctcagcctctgagtgatctaagccaggcatagttctcctgtcttcttgttggtgattggttctggaaaaggctgggacacactcctggccaaggagaagtcacagcagtgactgacttggagggggagtctgctgggggctggctagtggaaggcatctggggtaaaatgtttttgctcttaaaaagtactgtaggaggccaggcatgttgactcaggcctgtaatcccagcactttgggaggccaagatgggcagatcacttgaggtcaggagttcgagaccagcctggacaacatgatgaaaccccatttctatttttaaaaatacaaaaattagctgggcatggtggtgtgcacctgtagtcccagctactcaggaagctgaggcaggagaatcacttgaacctgggaggcggaggttgcagtgagtggacattgcaccactacactccagcctgggtgacagagtgagacttcatctcaaaagaaaaagaaaagtactgtaggaggccaggtgtggtggctcacacctgtaatcccagcattttgggaggccaaggcaggaggatcgcttgagcccaggagttcgagaccagcctgagcaacatagcaagaccccatctccaaaaaaattttaaaaagatacacaaaatttgccaggcgtggcggtgtgtgcctgtattcctggctactaaggaagctgaggagggagaatcacctgaacctgggagatcaaggctgcagtgagtcataatcacaccactgcactccagcctgtgtgacacagcgagatcctatctcaaaaaaagaaaaaaataataatgtaagagaaataaactttttcttttcctcgcagagagaatgtggcagtgtgaggaggcatttgctggcttaagctgggctctcaaactcttagtctagagcagagttctaacagcatcacgtgtttttgctttctctttcatccacgttgaagaagagggggtagtaaaaatattcctctggtttaacaaaaaattcacaaatatttatccttttcagaatctacatgcaatttaagtattagtcccagaatcacagatgctggaatgttaaagtttctttgacaagacatactgatgatctctgaagtccctgcggcctgcaaagaatatttgcaaacagagttttatgatgctgaggatgattctgaagccacagagaaagacatcatttttcttcttttctttctgcaatttctttcattagcacttcggagcacctatagtcgccatgagttgaaatctcatgagttagtagtaagagcagaatcagagaggctaaacactgaaaatacagaaaggaaatgggtagagtaggattttagcaagaggaagtatacggttgtgatgctttgcacctataggaaatgatggctggggctgtggcagccacgttaccaccgtgagggatgacattgcccacatgctgaggagcctgagtctataagaacatcattcaactgatgcattgacccctggagaacctccccgcctttgggggaccagcagttctgtaaaataatacgtgtccttattgctttttttttttgagatggagtctggctctgtcccccaggcgggagtgcagtggcgcgatctcggctcactgcaagatccacctcctgagttcacgccattctcctgcctcagcctcccgagtagctgggactacaggcgaccgccaccatgcctagttatttttttggatttttagtagagacggggtttcaccgtgttagccaggatgatctcaatctcctgagttcacgccattctcctgcctcagcctcccgagtagctgggactacaggcgaccgccaccatgcctagttatttttttggatttttagtagagacggggtttcaccgtgttagccaggatgatctcaatctcctgacctcgcgatctgcctgcctcggcctcccaaagtgctgggattacaggcacgagccactgtgcctggcatccttattgttttaagatgtttggaatttattcttctcttacttgcagccaacagcatcctacatgaggcagccagggtaagtggtccacatacaatgggtgaacaagtgcttatccaggaattgaaagagcctggctcattcagtgctaggaccagagccctcagtggacattgtcccacctttcagcactgaggatgcctcctcccctccaagccagtcattgctgtatgtgatcatgttaattaggtatccatattccacaggagggagcaacgaggttttcttttttttttttaagatggagtcttgctctgttgcccaggctggagtaaagtggtgccatctcagctcactacaacctcctggttccagcaattctcctgcctcagcctcccaggtagttaagattacaggtgcccactaccacattgggctaagttttgtatttttagtagagatggggtttcactatgttggccaggctggtctcaaactcctgacctcaagctatccgcccaccttggcctcccaaagtgctgggattacaggcatgagccaccacgcctggccgcaatgaggtatttttttgtttttttgtttttgtttttgttttttttcaattctagccgccaatcacaaaatttaactaaggtccctcccagcacacacctgtcatccatcctgaaaatttaaagtaaaggtataaaaatatcaaaaccatgattgcctttggggatggagtggaggtggggattatctgggaaggggcataaggggattttgcaggggtcacggagatgttctttatcttaacaggggcttgtagtctaaagcagaagcgtatacttattacataagtgcattcattggtcaaaactcagcaaatggagatgggaacagtggctcatgcctgtaatctcagctactgaggaggctgatgcatggggatcacttgaggccaggaggtcaagaccagtctgtgcaacacagaaagaccttatctcttttaaaaaaaaaattgttttaattccccaggcatagaactcaccctgtggagaaaaaaaaaaaaaattagccaggcgtggtggcatatttctgtagtaccagttactttcaaggctgaggcagaaggatcgcttgagcccaggaggtcaaggctgcagtaaactatgatcacaccactgcactccagtctggggtacagagtgggagcgcatctctaaataataatgacaatactaagaaattcagcaaatggatgtttcatatgtgtgcatttcattgcatgcaaatttataaaatctcaaagataactgcaaacattgaactccagttggtgatatgaatcctgaaatgtttaagggtaaagagtactgatgtctgctttaaaattctttaaccttctttaaaaatacatttttaaaaaatcagatgacttgatagaggaatggactgatagatatgtaataaagt[136 bp omitted]tggccaacatggtgaaacaccatctctaccaaaaatacaaaaattagccaggcgtgacagcgcatgcttgtaatcccagctactcaggagaatcacttgaacccgggaggcagaggttgcagtgatctgagatcatatcactgcactccagcccgggtgacagagtgagactccgtgtcaaaaaataaaataaaataaaataaaataaaataaaagtgatgatgatcatagttatgaacaacagtgagagttcacacactgcctgtactgtgggcaaagcccgttctcagtgcttcgtgtgaatgaatttgttcactcctcactacaaccttctgagatagatactgttattctcattcacagatgtggaccctgagaccagggaggttgcgtggcatcattacatcagaaggggagtggtctgaatccactcctccccttccagggcaggaagtcaacagagaagggctctgtggtaacgttgacaatcacaaatcagtggcataaacatctccttaagacatgcagaggcagctgggcgtggtggcccacgcctgtaatcccaccatgtgggaggccaacgtgggaggatcacttgaggttaggagtttgagaccagcctgggccacatagtgagaccct[131 bp omitted]gtgaaatcctgtctttattaaaaatacaaaaattaaccaggcatggtggcaggtacctgtaatcccagttactcaggaagctgagacaggagaatcgcttgaaccatgggagacagagattgcagtgagccgagatcgcgccagtgcactccagcctggacgacaagagcgaaactctgtctcaatgaaaaaataaataaataaataaaattaaaaattagcagggcatggtggtgcatgcctgtagtcctagctactcaggaggctgaggtgggaggattgtttgagcccaggagttcaaggcttcagtgagctatgattgcacaactgcactccagcctgggcaacagaacaagaccctgtctctgaaaaaaaaaaaaaaatgtggaaattgtgagagacacatgacaacagaaatgtgactactgcttgcctctggaggaaggaagaggtggtggaggagagataggtggctggacactgtggcaacaccagcataccaggggctgggagtggggggcagtcaggacatgaggccagaagctgtgaatcttggaatctgcagagtgccccttatgagaccccaagcattcatgtaagcgtccatgcccccactgatgatatctgggcagagaggcaataaaatcagagttgttgatcaagatttggaggctgcggttggaggccggacatcctgcctgcagggcaggcttcagcttggaagcttgcggcccagaacagtccccgtgggcacacccaggcagagggttttgctaggtgtctgacccagcttccaaagccagggtctaataacaacagcgccaccaacaacaggaaacatttgtgacgcacatgctgccaaagcactgttctaagcactccttacagtttaatcctcccaacaataagaatgaggtaggtaccagtgctaaccccattttacatagggggaaacttaggcacagagaggagaccccatgaaaggcaatggggacacctccaggaacctcccaccaaaaaagatcactgcagagtaaggacaaatcgaacatcagatttcctcaagggtgggcactttctcgatgcatttctggtgccctcttttggatttcagcctcagtggccacaacaccacgggtgtcagtgacaggagcaaaccaaatgcactggggactcagctgggaggagccgccctggcattcccaccatgtccgtgaaatggggggaatcgtggtatgtacttgagaatcaacagaggctgggcgaggaagacttgggatacttgtgagcccattctaacatcagcaattgctaatatcatgtttattgccttgaataaaagagatgaagaaataaaggaaaaagaggaaaggaagggggaaaggaatgaagaaaggagagacaagaaataaagcattttaggccgggcctgggggctcacacctgtaatctcagtacttgggaagactgaggtgggcatatcacttgaggtcaggagttcaagaccagcctggccaacatggcaaaaccccatctctactaaaaatacaaaaactaggccgggcacggtgtctcacgcctataatcccagcactttgggaggccgaggcaggcggatcacgaggtcaggagatcgagaccatcctggctaacacaatgaaactccacctctactgaaaaaaaaatacgaaaaaagttagccgggcgtggtggcatgcacctgtagtcccagctcctcgggaggctgaggcaggagaatagcgtgaacccgggaagaggagcttgcagtgagccaagatcacaccactgcactccagcctgggcaacagagcaagactctgtctcaaaaaaaaaaatgcaaaaactagctgggcatcgtaatgcacacctgtaatcccagctactggggaggctgagacaggagaatcacttgaacccaggaggtggaggttgcagtgagccaaggtcgcaccactgcactccagcctgggcaacacagcaagactccatctcaaaagaaaaaaaaaagaaaagtattttaatatcaaagaagaaggaagagggccagaaagaagagatagggctgaaaaaagaaggcaggaaacaagcagaatgtttccaaagagtcccatgaactattcagaaaacagttgttttgttttgttttgttttgagacggagtcttgctctgtcacccaggcaggagtgcagtggcatgatctcggctcactgcaaccccacctcctgggttcaagtgattcttctgcctcagcctcctgagtagctgggattataggtacacgccaccatgcccagctaatttttgtatttttagtagagacggggtttcaacatattggccaggctggtctcaaactcctgacctcatgatccactcactttggcctcccaaagtgctgggattaccgcgcccggccaagaattttgtctttaaaggagttgacagtggggtgtggaccgtgtagccgagacagcttgcagggtgagttaagagtccgcctggattccatccccagccctgccacactttgtccatgaagcaagtgactgtcccttcccaagcctcagtttctgcactgcagaatggggaccattgtccgtggcatttccacaggttggcgtgagaacctgttgagcccacgcagcaaggtgtgcctgttgtctatggtaaggggcagacggcattgcctactttccactcgtaagatgtcattgcatgtacccggttctcacttggcagatgaatcaaagggctataaatagccatgtcttggtttctcataaacgcattaaatatgacttggcatcttgcccaggcttcctgtcagggcagtggacgaggattgttttgcagaggtctgatgagtgtcaaggttatagtcacgtgcaggtgcgtgaggcaggactcgaagtgagccccagctgccctggggaatgagggggtcttcccttccacccccatgccctccttggcataggtttacaccagccactgtgggccctggcaagccccgccttgtggctcaggctgggccactggcctctttgctggctttgcctggactcaccccactggtccagcttgcatttggtcagtctattcacaggtgaattctgggaagactggacccggctatgggaagaggggagaggagggaaaggtggacacatgactcgtgagcttgctgggctgtcctgggcccctccctccatcttacttcatgaagttctctgaggctgacctcacccctgactcagggatgaggccctgggggtggcagatgtggactctggaaccccgctgcctaggttcaagtcccagctgctccatagaggacctcaggcttgtctatgctctcagtacctcaatttcccccctctgtgaaatgaaggtaatgcctcatagaatctacctcatggggctgctggaaggattcaatggatgttgatcatgatcatgatttcctgatactcagaataatgccaggcacagattatctgctctgaaaaacgttttgctattattatttttctgctagtgatagttaagagcaaggactctagacccagcccagttgggttcaacgctcagctccaccacttgcaaccaatgtaaccttaaacctggatataatctctctgtgtcagaggcatgtgaaccagaacaactccatcttgaatggggctgggtaaaatgaggctgcattcccagatggttaggcattctaactcacaggatgagattggaggtcagcacaagatacaggtcataatgaccttgctgataaaacagtttgcagtaaagaagctggccaaaacccaccaaaaccagagtgacctctgttcgtcctcaatatgacactcccatcagcaccatgacagtttacaaataccatggcaacatcaggaagttaccctatatggtctaaaaaggggagacatgaataacccaccccttgtttagcgtaacatcaagaaataaccataaaaatgggcagccagatgccctcagggctgctctgtctattgagtagccattctttattcgtttacttttttaataaacttgccttcattttactctacggaattgccctgaattctttcttgtgcgagatccaagaaccctctcttggggtctggatccggacccctttcctgtaatgtctgtgcctcagttccttcatctgtaaaatgggagtgatgattatctgtaccttatagggtgtaatagggataaaataagcaaacacccgccaagtactcagacgagagcctggcacacagtaaatactccaatgttgttgctaccattgatgttcttgttacaggtggttgtgctcaccccgcatcaaggttgctaagctgctgtgatggaatcctggagctgctgaaggacacctcatctctttgtgggaagcatctgcttgaggattaagggaatgcagaaaaaaagtggagtagagagatggaggaagatgactttcgaggacattgtgtgagcacctggatctaactgtgcctgaagcaaaactcaaaccctggactctcaatgtattggctctcagttccaagacccaataaattccttcttagcttagaatgctttgctcagatgtctgttacttccagccaaatgtgttttaatacagaaagctcttgggggctcaaataacagaaagggaagctatatgagaagctgagggaagctaaggagaggaacagaagtgatacagcagggtgtggtggctcacgcctgtaatcccaggtctttgagaggctgaggtggtggaccacttgaggtcaggagttcgagaccagcctggctaacatggtgaaaccccatctctactaaaaaaaaaaaaaaattagtcagacgtggtggcatgcatgtgtaatcccggctactcaggaggcttagtcaggagaatcacttgaacctggaaggtggaaattgcagtgagccaagatcatgccactgtacttcagtctgggcgacagagcaagactccatttcagaaaaaaaaaaaaaaaaaaagaagtgatacagcttaagagagtaggccatgtggaggccacatgcatcatgggttagaatccaggctgttactgagagcttgtggtaggatgttgcagaatggacacactctttcatgcctccttgtgtacattcttacaaggtgactttgccactcttcccatcaagggatggagtctgtgtctccaccccttgaatctgggctgaccttgtaatttcttttggccaatcaaacatggtgaaagtaatgctgtgttagtttcaagcctagacttcaagaaaccttgccgcttccatgtactctcttagttgatcttgccatgaccttgtgaacatgaccgggctagcctgctggaggatgagaggctggaggctccccagcgaactgcccatccagccccctgaggcagagccacctagctacacagtgctggccacagatacatgagtgagcccaacctacattaccaacctgcagaatggacagataaatccatcaatgttgttttaagccattttagatgatttcttaggcaacagtagagaactgctttgtctggtttaactcaaccttgcccaagggccttccaaaaccctgacctccaggtcacatgacaaggtgaggcctctacatcccagtccctggtgatactgtgctagtttggaggctgggtctcaagtgaccttgcaacttccattcactttcttggactcctgccaccaccttgtggacacacctgggttggcctgctggaggatgagagagcaggtggaggagaacccagcggctccagctgatgacatctggtccagcctacagagagccaactatcgagtcagccaagatcagcagagccaaccccaattcactgctgctgatcagagaagcaagaatgatcacagctgaaaccagaactgcccaactaatttgtagacttgtaagcaataatgaatgcttacaattattattaaacaataatttaaatctctgacttgggggatgttttgtttgcagccataactgatacactaaccgatacactttgtaaacatgggcaaataaactcacatctctgtgccagagttcctcttgtgaaaaacaggaaccatttgggatggtcatgaggatgtcatgagctcatgatcctaaaactcttggcacagagcctggctgtcttactctgttcaggctgctataataaattatagcctaggtggctatagcctagccatagcctaggtggcttcaacaacaaacatttatttctcacagttctggaggctgggaagtccaagatcaaggtgccagaagtgatgtatgatgagggctgttccctggtttgcagatggccatcttcttgctgtgtcctcacatatcagagagcagagagagaaaaggcaagctctttggtgtctcttataagaacactaatcctatcatgagggctccaccctcatgacctaatgacctcacaagagctcccctgcaacactatgccattgggggttaagatgtcaacatgcaaatttctgaggagacatgcagtccataacattggcagagagtgaacactcaatttaaaaagaggtaaaatgaaaggcagagagacagttgaataacaccctgcccaccatgaacctttttgccttgtccagacagctgtgggtcatttttctttctttctttctttcttttcttttttttttttttgagacagagtctcgctctgtcacccaggctggagtgcagtggtgcaatctcagctcactgcaagctccacctcccgggttcacgccattctcctgccttagcctcccgagtagctgggactacaggtgcccaccaccatgcccggctaattttttgtatttttagtagagacggggtttcaccatgttagccaggatgttctcaatctcctgacctcgtgatccgcccacctcggcctcccaatgtgctgggattacaggcatgagccaccacacctggccagctgtgggtcattttagtgtagcctcccaatggcccataggtccccagcctcttagcccttcatatcaccaacacagagacattccttggtggcagaacaaaaacccttgggaataagaaccacgacctggtaatctgagacctaccgattcagaacaggtagcagcacattgttgtaaaaagctctggattcagttagacctgggttatgatccaatctctgccgtttacctgacatgtgatattgagcaatcaatgcaaccattccaatcttccattttatccctgtaaaataaggataattgtacctacctcccaggagtcttgctcaatcatttcttccttcagtttagtatttttttattttttatttttttaaacagagtctcactctgtcacccaggctggagtgcaatggcctccagctcactgcaacctccgcctcccaggttcaagcaattctgatgccccagccttccgagtagctgggattacaggcctgtgccaccacgcctggctaatttttgtatttttagtagagacagggtttcaccatgttggccaggtggtccggaactcccaacctcaggtgatctacccaccttggcctcccaaagtgctgggattacaggcatgagccaccacgcccagcccttcagtttacatttattgaggtcttacgttgttccagctctttcagaatctggggatacaatggagaacaacaaccacaaattcctgacctcatggagctctcaatttgtagcttaaagaaaaatactaatctgatagtgacagaaacagtgaaaaattgcaaaagagacaagtgttttggaaggagaatgtatcagtcagaataggctgggttatgctgtggtaacaaacatcccccaagtcttagcaccttataataacaaaagtttactttttatctgtcacatctattgtaggtcagtttcacttctcctccttttcaatccaggctggcagaatggtctccaactcaagaattgtgggctctgtgcagagggaaagagaatcctagagtatctttgcccaggcaattaagtgctctggcctagaagtgactgtattacttctgcccacacttcattggccagaactagttgcaaggccccacccaaccataaggaggaccagaaatggcattccgtcctatgcttggaagggagagagccagggggattcagggagcagcactaatgaccattctgaaagcatatgtgtgatgggaagacttccatgaggcaatgatgcttgaagtataagagcagttaactaagagaaggggaaagtaagagttttctaggttggagggcacagcatatagtgaggagagtaatgagtagaaacagcttatgcaaccagtttgattggagctggaaggagcatgtgtggtgcaaggaaaagggaaaagcgagcagtcatccatcgtgcagtaaagaggttttctttttgagacagagtctcactctgttgaccagtctggagtgcaatggtgtgatctcggctcactgcaacctccacctcctgggttcaagcaattctcctgcttcagcctcccaagtagctggggttacaggcacccaccaccatgcctgactaatttttcgtatttttaggagagacggggtttcgccattttggccaggctggtctccaactcctgacctcaggtgatccacccgcctcagtctcccaaagtgctgagattacaggtgtgagccaccgcaccctgcctgtaaagaagtattaatagatgccaatgaacttcctatgtctgaacaaggaaatgataagtatatacaagttttaggaattcagagaagtccatattattctcaggtcaacaaattatttgtacaaggaatcagaattacagattctttttttttagtggttagaattgctttcacaggacatggccacaatttctgaatccccacctgggcgttaattggccagatggccaacaatttacctcctcttcctgggcacacaggcagccatatttcccagcttgctttgcagttgaggaggggtcatgtgactgcgttctggccaatgaaatgttctggccagtggacaaaacagatgacacttctaggcccagctctacccttcatactcagttccatgttctctctgtccattgtgtggtgaccttggaagccagtacttcagatggcagcctgcattcctgagttatctgaatcaagtgaaagaaagccacctgagctgagactatgaggttgaaaccatgccccaaagagttaaaagaaatcagtaactaacagaaattcttgagtttgcaggatggcagataagaacaacttgcggaaatgtgaaccactccctccacttatgagataaaagaactggctgaaatcaactggaaacaatatggctaagtggagtctgtgcagaaccagtttgctgaagtcacagcccaaagtttcatactaacccgtcaagtttgcacatgggaccccctaaggaggcatgagagagaactatgcatgcctgaggactttccagacctccccttggcttccaccaatcactagctaatcccagaatccaccccctaacctttcctggtaaaattactgccttaaagccagcatagggagacagatttcagtgggactcctgtctccttggaagttaacctgcaatataaagcttttattttctcaaaaacctcatgccatagtattggcttgttgtgcatctggcagcaaaccccttttgcttgatactaatgtaagcaggaaacaaacctctgtgttttattctggagcgtatttattgctgcagtggagcctatcctatactgactaatacagagtaacaaatgagactccttcaatagcagtaggatttgccaagacaatttttttttttgaaatggagacttgctctgttgcccaggctggaatgcagtggtgcaatctcggctcactgcaacctccacctcctgggttcaagtgattctcctgcctcagcctccccagtagcagggattacaggcacatgccaccacacctggccaactcttgtatttttagtagaggcagggtttcaccatgctggccaggctggtctcgaactcctgaccttgtgatctgcctgcctcagcctctcaaagtgctggaattacagatgtgagccactgtgcctggcctgccaagacaattttatgatgcagaaagtatctgtattcggggttgtcatgtggagttgtacaagttgagcactgcccgacatgtccagccaagggatgaggggaacccactccatgctccactcaccaggcctttatacaatttgttctaaggtgacaatttgttctaaggtgatatagacaatttgttctaaggtgacagctttagaaagaaagggaatattttctccttttctttctctggcagagtagaagagccgtatagcaaggctaagtactggaattgcatttataagcaattatttttttccccaaaaacataggcctaagaagttaaaaaattacaataagaaaaggaagagggaagaataggatggttaaaaatggaatctggggcgtgttttgtcttacgctgtactctgttgtgcaggggagggtggcaaggctgggcctgaccatgtctcctgcttggtgaggaaagtttcttattgtacagctggccacacgcaaagcggctgctactccctgctgcaacctggggggcaacccacccttacctgtaaggaaccccaccttgtcagaatcacttttttttttttttttgagatgaagtctatctttgttggccaggctggagtacagtggcgcaatctcggctcactgcaacctctgcctcctgggttcaaacaattctcatgtctcagcctcccaagtgctggaattacagctccgccaccacgcctggctaatttttgtatttttcgtatagatgggttttcacagtgttggcaaggctggtctcgaactcctgacctcaggagaatcgccattttaagtggacatcaggtcatgtctctccactgctcaaaaccctcacgtggctcccatttcatttcaaataaagcccacagctgctatcctggcctacagagtcccacacactctcggccctggtgacctccttgatgttctctccacagttgccttcctgtcctaatcagctccgtccaccaagtagacacccagccccagagcccttatatacgctgcctgtgcctgcaactgcttggggtaggctgaataacacctcccaaagatgtcactctaatccccagcacctgtgaatgttacccctggggacctgcaagaggatgtgtagagtgtgccttacaggggtgaggaagctgggtgctcccgttcccatccctcgaggttaaggactgctcctggggtgtcaactgcccagcttctagcctgctccatgagtggcccagcaggcttctggtatgagttaggaaacccctggcacccactggaatcatgcccatgactgctaaagctgcaggggacttccaggtcttttcagggatatgggtgagtgtatttgttgtctgttgctgcaaagcagattgccagaaattcagtggcttaaaacaacacacgtctatgatctcacagtttctgtggatcaggagtccaggcacagcttagctgagccctccatctgaggtctcagaaggctgctgtcagacacggatcaggctgcactttcatctggaggctcgactggggatgaatctacttctgagttcatccaggttattggcagagttcgtttctctctggctgtgtgactgagggtcctggccttttgcttgctgtcaactgggagcctccctcaggtcctagaggccacttgcatctcctggaggccacccacagctccctaccacgtggacttcctcaatgtggctgcttacttcatcaagccagcaaggctccctccctctgatcttctaagacagagtcttagataacataaggcaagctagggagtgacagctcaacacctttactgtgtgctattggttagatgcaaggtcacaggtctgtccacactggaggagaggggatcatacaaggcatggacaccaggaggtgggaagtcactggggtcaccttaggagctgccctgacagccttggagcactggggcactgacagcctctgctatgggttgtgagacttcagtgctgcgaagaacaaaccccttgagtgtgggacccgtgcttgactctctctgtcccacctccagctcccatacaatgggggcttctatgggttgcaggcattggggggctccctgggacctggggtgggcgcttcaggtctcctttcaccttccaaccactggccccttcccaagctcactgtgtgacctcaggcaagttgcttgaagcttctgagtcttgatgttctcagctgcaaaacaaggttaacagtagcaccagcctcttgggtgatcgtggggacatagcacttacaaagggtttgagttttgacctcaccaggaagtccccaaatgtttgctatgattatcattattattgtctacctctggttcccagggaggcctctttagttctcagggaacgctccctcattctgcaggaatctttgagcatctgggcaccacatgaagccttaagtgttttggcaacagtgtctggtacacgaaggatgagccctgccctatcctgggggcagaggttctgttctgggagagtttcatctctgtccagtcatggcttcactgcactattagggcaatgaattttaatggcatgaattatttttcactcttgcactctgctgaacagtgtgtgatttctgggaacagtcaggcctggtgattcctgcaggtcagctgagccaggcctggcaccttgtaccagcaaaagggcctgtctccccttccaagggcctgaggggcctcactccaccacaagagcctggaaaagtggcgcgtgtctggcagtgcctctgacttggggagtggtggctgggcctgaaggcctgggcacagtggggagggtgggcaagggatgggcaggaaaagacagcagggcccagggcagatctggggagcctagaggtgtcctgctcatatcccccatcttgtagttgggggaatgggatgagtgaggaggctatgagttaccacctttagggagacaccccaagaatggcctggttccatctctccctccttctgaagaacacagggcttgggacaggcaacctggtttgaactagaatcaccagcctcagtttcctcatctgttctatggaaattactaatgagttaacagagcagcacctgacccagggaagagctcggtcaccctgggctacggggcaccggggcggaagtgacagaaggggcggctgtggctaagagagaaccggaggccgggtccgcttgtgcaccgggggctcgctttatttcaccaccagcacctgtgtgcttctcctgcccggggaagggtggatgcacttgagcagcgcccccagcagggccaggacggtgaccacgagcagcaccagcttcagccccttgagcacggagtccgccctgccccgcagggccttccttgcctcccgccactgggcatcgttctctctccactgagcctccagcgtctccagactggcggcgggtttgaactgggccacgagctcctgctgcacgaagcacttgtagacggccggctggaaaacctgcagctgcctgccgccggtggaggggtccagaaaggtggtgaagtcctggccggagagctggctctcccacgtcaggggggtgtcgttggcacgccagttgacgggcctgcgaggaggacaaggtcaggtgcagggccagggagaaaggagggaccgacgtctccctgaggaacagaaaataaagcaccgcccagtccccctcctcgccaccccccacggagcactgtgcagccgtcaacagtggggtggaggaggcacagctgggggctcccagggctccacccgttactggccccaccccttactggctcccctcttcctggctccaccccttactggccccaccccttactggctgggtgacctgggcaaatgcctccagctctttgaacttccatttctttatgtaaaactaagagtctagaccaggcttggtggctcacacctgtaatcccaacactttcagaggcaaaggcaaggaggatggcttgagcccaggagttcagaaccagcctggacaacaaagcaagaacccatgtctgcaaaaatttaaaaaattagctggacatgctgacatgcgcctgtggtcctggctgctcaggaggctgaggtgggaggattacttgagcccaggaggttgaggctgcagtgagccagtcacagcactgcactccagcctgggtgacagagcaagaccctgtcccaaaaaagaaaacaacaaaccaaaaaaaatggagagtaatgattgtacctcataaggttatttggaggagttagcaagggcactccttaaatgatttgtccacctgcctttgcctgtctggtctcatctccttcactctcccctttactcactctgcctagccacgctgctctcctagatgttcctctgacatgctgggtgcagtcttggccctggctgttccctctgtccccagggcttcctcgcctcctttcagtctgggctgaaatggcagcttctcagaggagccttccctgaccccaccacttgacacttttaacctcccctattcccagcatcccttcctgctccgtcaccatccaaaatactataggtcgggcacagtggctcaggtttgtaatcccagcactttgggaggccgatgtgggaggatcacttgagcccaggagtttgggctcagcctgggcaacaaagtgagacctcatctctacaaaacttaaaaacttagccgggtgtggtagtgcatgtctgtagtcccagctactgtggaggctgagatgggagaatcacctgagcccggggaattgaggctgcagtgagctgtgattgtgccactgtactccagccagggtgaaagagcaagaccctgtctctaataataataacaataataataataaaactatatatttatgcgccacaagggcaagaatctccgttggttgtgttcttcactgtttcccaggtccctagaatggagcttggcatataaatatgcagtgaacacgtgtttagtggagaaatgaatcaggcaccgacacacccagcgtggtggaagaacagagaggatattccacagacaatatcataaaagcttgcattcccagctaggtacattgtggaacttcttattggatgctatggcaggcactctacagtctttagtccccttaacacatcacaatgaccctgtgtggccaggggctggcaagacctctgcactgagttagacagtggcccccgcaaaatgcatgtccttcccagaacctcagaatgtaacattatttggaaattggatcattgcagatataatcagttgagatgagagcatattggaataaggtgggccctcaatcccatctgaccggtgtccttttaagaaaaggaaaagagagacagggacacagacacccaggaagaatgccaagtgatgatggaggcgggcattggagagaagcagccacaagccagagaagaccgggatctctgactgcatccagaagctagaaaaaaggaggattctgcccagctcactcagagggactgagagggagcgtggttctactgacaccttgatttcagacttacggcctccagaagggtgagacaatggatttctggggtttttttgtttttttgttttttgagtcagagttgtctcgtgatgttgcccaggctggagtgcagtggtgtgatctcggctcactgcaacctccgcctcccgggttcaagtgattctcctgcgtcagcctcctgagtagctgggattacaggcacgtgccaccatacctggctaatttttgtatttctagtagagacggggtttcaccatgttggccaggctggtctcgaactcctgacctcaggtgatccacccacctcggcctcccaaagtgctgggattacaggcatgagccaccgcgcccagcctgcatttcttattaaggggcaggtggactgggggagaggaggggaaggggctattttccagaggctcctggcaggaagtaagaagatgagtgtgagttctgggaggcaggccttgatgggaagccccgggggcaccagcctctcctccaaggtctcactgacctttccagatgaagcaggggcctgttggagcccctaagcttcctgggcttcccccatcacagccccatctgtctgcctgggcttctcccatcccggctcgcaccaccctgggctgtgtccccctcggactgtttaagagcagggcctggcactgtcctgatgaccactacgtggctgaactgcaaagaacgcccactcatccctctgcacatattaccaggaaggatcccctgaccggaagaatctgggtaggggccagaggcagggattccatcacctgtacatggatcctaagggacagtcgagccacacaaattctgtcttctcatcgagcctgaagttgtcaaaaatgacgtaatccacccttaactgtgtgttattggtgcactggacgtggcaggcttccacctgcagctcaggccgcaagcggctagaccacaccagcacctctcccagatagagccagcagggcatggcttcctccagaggctcctcaatgtagcggtaccccaggcgtttacactcgcccggctcctcacagcggttgcagtcctgccagggctcccaccaggtaaaaatgagctgtttgctgcccaaatgcagggtctcgttctgcaggggcctctgacccaggtccttgtgtgttatatgcagggtggtgacatcctgaaagtcaatttcatactgcaccacttggcggccattcttgttccagcagtggtagaggcccgtctgggagggcaatggatctttaatgagaaggctgccctcgggcattatttccatattggaaatattggtgaggctggtgagcctgcccttcttgccttgtgtgaataaatagtaccagtgcgcccccgaggagttgcaatacaggagaatatcattgcctgagagtagggcctgttggcactgcttaccactggggcagctgatggaaaagtagaaccccagtgccggggcagcaaagtggagcagcagccacagcatgggtggcatggtggactggggctgtggcagtgggctggtgccaccccgaacattgtgaggtcacccatgaactctggcctcagccctgggcagtgggatgaattgcagctaccacatgtgtgtgtgaggtcaccatccccttttgttttgtgacaagctgacaacactgtttttcttttttttttttttttcagacaaggactcgctcttttacccaggctggaaggcagtgctgcaatcacagctcactacagcctcaaactcctggaatcaagtaatcctctcacctcagcctgttgagtagctgggacttcaggtgcatgctaaccatgcccagctagtttaaaattttttctgtagagacggggtcttgttatgttgcccaagctggtctcgaactcctggcttcaagccatcctcccaccttggcctcccaaagtgttgggattacaggcgtgagccactgtgccccgctgaccatatttaatttctattccaagccctccattttgctgggaaaggagcaaacttaatttgtctattcagagttttctctactacctgccccgcttcctttcccaggggtgagactacattcccagggatgaaataagagcatgaaggtgtcacatgtgaacactcaacacatatttcctgaactcttactatgttctgggcacacttcttagcactggggataaagcagtaaacaaatcctctcgggctgggctcggtggctcatgcctgtaatcccagcacttttgggaggctgaggcgggcggatcacctgaggtcaggagttcaagaccagcctggccaacgtggtgaaaccccgtctctactaaatagctgggtgtggtggcgggcatctgtaatcccagctactcaggaggctgaggcaggagaatcacttgaacctgggagacggaggttgcagtgagccgagatcgcaccgctgcactccagcctgggtgacaagcgtgaaactccatctcaaaaaaaataataaaaatttaaaaaaatttatctctggttactgttctgacctcctgcacctttccccctactccctaccctccaaccacgctggcctcccgctgttccctgaatctgtcaggcaggcagaggggctcttgccccagaaccattgcacatgctggtccccgtctcttccctcagccatctgcatgactcaatacatcttcaacaaatatttttctcagttgctccctttccttccatccccttttctaaacaccttctcaggcggtggctcacacctgtaatgccagcacttgccagcactttgggtggccaagatgggagaatcacttgaggtcaggaattcgaggccagcctggccaacacggtgaagccccatctctactaaaaatacaaaaaattagccaggcatggtgtcgggcatctgtaatcccagctactcaggtggccgaggcagaagaatagcttgaacccaggaggcagaggttgcagtgagtgcagattgcgccactgcactccagcctgggtgacagagacactgcctcaaataaataaataaataaataaataaattaaatgatcttccagacttttcccaacatagaaaaagatggaagatttctatgagacttgcatcaccttatctcaaaaccttataaggacattacaacaaagaaaaacctcaggtcaatctcttttgtcaacacagacacactatcccaaagaaaatattgcaaattgattccagtgattttctttacacaaggataaatataaagaccaaattgggttatttcaggacggcaaatttgggttatatttgcacatcaattaatgtaattcaccacattaacagaataaaggagaaaaaccatattattatctcagtagatacagagaatgcatctgataaaactcaacattcatttatggctcaaaacttttggcaaactaggaacaaaaggaaattttctaagaagataaagtgtttctattaaaaacctaggacaggccgggtacagtggctcacacctgtaatcccagcactttggaaggccgaggcgggtggatcacctgaagtcaggagttcgagaccagttagggtaacatggcgaaaccctatctctactaaaaatacaaaaattagccgggtgtgatggtgggtgcctgtagtcccagctacttgggaggctgaggcaggagaatcatttgaacccaggaggcgaaggttgcagtgaactgagattgcgccattgcactccagcctgggcaacagagtgagaccctgtctcaaaaaaaaaacaaaaaacaaacaaacaaacaaaaacacctagggctaaattatacttcatagtaaaatactaagaataacacaagtatttctgccatcaacttttccattcagcattttactggaggtaagatacaagcaaaaaattagatataaggtcatatattaaatatgatttatataccagcaacaaagaattaaaagatgaaacttaaaagattactataggatagtatgaaaaaattaaatacctaggaataaatataataaaagatatgtgagtcctctacattaataacttcacattattgggagaaattaaagaaagactaaacaatggaagtatttgccacattcacggattggaagactaaatattgaatatatattgatttaccccaaatttatctttagattcaataaagtcccaattaaaaaaaaataagagttttggggtggaaactacaaaccgattccaaaatttgtatataatgggccaagaataaccaagacaatcttgaagaacaaagttgggaaacactaccacatattgtgacttattgaaaggtataaaaagacactgtgggctgggtgcagtggcttgtgcctgtaatctcagcacttgggaggccaaggagggcagaatcacttgaggtcaggggttcaaaaccagcctggccaaccccttctctactaaaaatataagaattagccgggcatggttgcggatgcctgcaatcccagctacttgggaggctgaggcaggagaatcgcttgaatttgggagatggaggttgcagtaagctgagattgcgccattgcacttcagcctgggcaacagagggagactccatctcaaaaataaataaacaaataaaaggaaaaaaaaaaaagaaaaccaaagacactgtggcattgggacaaggatggatagataaattgtatccagggtccaatcaggagacagaaacatcagtgtctacattgtcatgagcccatgggcctgagtagctcggtctctagattctacatttggcctccccctgaatatcagaagcctgtgcagacaagaactaggtcattgctgtgtccctaacatcacctgcccagggcacactcagaggaaacaccagggaattcttcctgcatgcgcatctcagcaagccagtgaggagaccttttccttagcagaaccaacatgaaggcttatgggctgggagacggagcccggttttctgttggaaggtaacccatgagcccaggtgaacacagaaaacaaagtctgggtgagggtcaagggcagggctacggccctggtcctgtcacctgtagatggaggccaaggggcaggtgagccacctgttgttcatccacttgccaggctggtaaaaatcaaagatgaggtatggctagtgaatttccttgacggggttgcagggtacgtggcaggcttccacctgcagttcgggccgcatgcggctgaattgcatcttctcatctctcagatacagctggcagggcataggtttttccacgggctcctcaatgtagcagtaccccaggcgtctgcactcacccagttccccacagcggttacagtcctgccgggggtcccagtgggtaaagatgagtaccttgccatccaggatcagggtctcattctgcagggacttttggtccaggctcttgtgcgtaacatgaagggtggtgacaacctggaagtcgatctcgtattgtaccatgagggtatcatcattgccctggcagcgatagaggccagtctgggagggctgagggttggtcaattgaaggctacccccaggcagtttccttatgtcaggcattgaattaagcagagaaggatcttccccaagaatggaagagaagtaccagagtgccatgggatggtcacacttcaggacagcatcactgcctgagagtagggctcgctggcaaaggtccttgtaggcacagctgattaacatctaggctcacagagtggggcaagaaaggctaagcagccacagggtgtccagcatagtggaccaaggctgtagaaggaggctaggaactccctggccattgtgaagtcactcacaaaactcgaggatcagcctaggcaatggaatgaaacttgatccactgtgcttccaggagtacaattcagttcgtgtcatcaaatggcttgtcataggttgtagggtcgaaggtcaaatatccacatgagctaggcaggaaacaaaatgggtgagcttaaatcagaacaaacgaactacaaaggcaaattattggccctccacatacccaatatataatgatggaatgggacaaaatgactttatgaccatcagaaagtggaagaagaggcagggcccagtggctcacacctgtaatcccagcacactttgggaggctgaggccggtggatcacctgaggccaggagttcaagaccagcctgaccaacatggtgaaaccccgtctaaccccgtctctattaaaaatacaaaaattagccaggtgtggtggtgcatgcctgtattcccagctgcttgagaggctgaggcaggagaatctcttgaacccgggaggcagaggttgcagtgagctgagatccaccactgcactccagcctggacaacagagaaagactctgtctcaaaaaaaaaaaaagagaaagaagaaagaaagagagagagagaaaaagaaaagaaagagagagagagaaagggaagacacacagaaatcactgctctgtaccacttctgcaatccagtgggaaaacattacaaggaccccctatcttgtagatgggaaagattccttaactagcaccgaagcagctccttgttgtgtgtggggagggtagggggattcccaaatcattgttctctgtgggtcatgtctcactctccagggaaatatctccttttctcatattctccttggctacatctgaagatgtgccctccttgagacaacagcagtttactcagcctgctttctatctcccacagtttgggacctacggttcttataagcctctagtcaactaaatatgtaaacaaacaaacaaacaaacaaacaaaaacacacacatagccgtagttctgttcgagatgttctcaggctgggctcggtggctcacgcctgtaatctcagcactttgggaggccaaggtgggaggattgcttgaagccaggagttcgagaccagcctgggcaacatggtgaaaccctgtctctcctaaaaatacaaaaattagccaggtgtggtggtgggctcctgtaatcccagctacatagcaggctgaggcaggagaattgcttgaacctgggagatggaggttgcagtgagccaagatcacaccactgcactccagcctgggcaacagcacaagactctgtctaaaaaaaaaaaaaaaaaagatgctcttatcctctctctctttctgtctctttctcatttcaggtaccttaaactctatcagccatccttggcgagctatatctcttaactctctttcatggagacatttgtccacctgaaagcgttttctggtagtatcttaattcattcagagaatttttaaacaatgggtaataattatttacctaggcttatacttttgattttatccttgtcaaaagctgaattctaattggactttatctctcaaagcccttctcaatttttagctaactttggccaacttatactgctaacatcttatattccagcagcttccttgaaagctacaagtccattaaatacattatctgccttccagagtatctcaggcaacagcctccatccttctggtttcaaataagtgtcttagtcccaaaggtatctaagccaatgctgtctttttatttttgattacctcagcaccctactcctgatactattttggt[138 bp omitted]cctgtctctactaaaaatacaaaaaatgacaaaaccctgtctttactaaaaatacacaaattagccaggtgtggtggcatgcacctgaagtcccagctacttgggaggctaaggcaggaagatcacttgaacccgggaggtggatgttgcagtgagctgagatcatgccactgcactccagcctgggtgacagagcaagacttcatctaaaaaaaaaaaaaaaaaaattccccccaaatctcaaccacataaaacaactaaggtttactttttactcattgtgcattggtattggaatcactcaggaatccagggtgatggcgcaactgccatctcaaacattttcagtttcttccaaggagaaagaaagagctctctgtaagattttgggtctacattaaatgctttgcccttaagtaacacatgtcatgtcgcttgctcacaaaccattggctagaaacagctacatggcacca[136 bp omitted]aaaccccatctctattaaagatacaaaaaaattcgccgggcgtggcggtgtgcacctgtagtcccagctgctggggaggctgaggcagcagaatggcgtgaacctgggaggcggagcttgcagtgagccgagatcgcgccactgcactccagcctgggcgacagagcaagactccatctcaaaaaaaaaaaaaaaaaaatggaactctactatttccaggaatcttttggcaaatggcagtaatgatttccatggctaatgtctattacaagggatttttcctctggtgttctcctttatatcacagagttaaaaccatttccaaaatcctcacatcagctctcccctaaagttctactggccaggattggggcccatgcccaggtctaaaccaatctctgaaaataaatgaagcttacatcgttggcttaaaccaattagaatttgttgcctaggattgggtaaggtcagctttttcttagcagaagccactgaagacccagacaaaatcagggttttgtatgcaggggagttgtagaaaagaatgctgatttggtgtagccaaccatgtcttccacagcattgactgatgggaaaatattagttgtaccagaattgtgccaggcactgtgtgagccacatgaccccaggcaagttgctgagactttcctttttttttttttttgagacagagtctcactctctagcccccaggctggagtgcggtggtgcaatcttggttcactacagcctttgcctcccaggttcaagcaattctcttccctcagcctcccaagtaggtgggattacaggcatgtaccaccatgcccagctgatttttgtatttttagtagagacggggtttcaccatgttgaccaggctggtcttgaactcctgacctcaagtgatctgcccgcctcggcctcccaaagtgctgggaatacagatgtgagccacagcacccggccagaactactggagactggtaaatttataaggaaaagaagattaattgactcacagttctgcatggctggggaggcctcaggaaacttccaatcatggtgcaaggcgaaagggaagcaggcaccttcacaaggtggcagcaaagagacagcaattagggaactgccagctacttttaaagcatcagatctcatgagaactccctcactgcacgggagaaaccactcccataatccaattaccttccactgggtccctcccttgacctgtggggattacaattcaagatgagacttgggcggggacacaaaaccaaaccatatcactcatccaccttgcaccagacaccaaggatccaggctaagtccctgacctcttggagcttacatcctagtggggatgtattagtcaggataggttaagttatgctatgtaacaaaggattctaaaatcttagtggcttaataaaattttttttcatgcgacatgtccaaatttggctggggagagctatactccacaaagtcccttcagatactgtggctaacagaggtggtaccatctgcaacatcattagttgctatggcaggataagggagtatagcaaatcatgaactggcaattgaatgctttggtcagtgatatggtttggctgtgtccccacccaaacctcatctcatattgtagctctcataatccccacgtgtcatgggaaggacccgatgggaggtaattgaatcatgagagcaggtttttcccatgctattctcatgatagtgaataagtctcacaagatctgatggtttttttctttctttctttctttcttttttttttttttttttttttgagggagagtctcactctgctgctgcccaggctgaagtgcagtggcacgatctcagctgacagcaacctctgcctccctggttcaagcgattcttgtgcctcagcctcctgagtagctggaattacagatgtgcaccaccatgcccagctaattttcatatttttagtagagagggggtttcaccatgttggccaggctggtcttgagctcctgacctcaaatgatccacctgcctcggcctcccaaagtgctgggattacaggcatgagccaccatgcctggtgagatctgatggttttataaagggcagttcccctacacacagttgcttgcctgccgccatgtaagacacgcctttgctcctcctttgccttctgccatgattatgaggcctccccagccatgtgcagctctgagtccattaaacatctttttctttagaaattacccagtctcagatatttcttcatagtagcaagcaaatagactaatacacagatggtaaacaaataaatgactaataaaacatcaggtcatggtaaatgctttgaagaaaaaaagaaggcgcaaagagagattggggatggagactattaggggatgaattatgaccccacaagttcatatgttgaaacactgacccccaatacctcagaatatgactgtattgggaaacagggcttttaaagaggtaattaagttaaaatagggttgttagagtgggttctaatccaatatgactagtgcccttaaaagatgagggaattagaacccaggcagagggatgaccatgtgaggacatagtgaaaagggaaccatctgcacaccaagaagaaaggcctcagaatgaaaccaaacctgccaacaccttgattttggacttctagcttacagaattgcgaagaaataaatttctgttgtttaaaccacccagtctctggtgtttgttatggcagccctagccaactaatatagagactattttatttttatttattcatttgttttgagacagggtctcattctgtcacccaggctggagtgcagtggtgtaatcatagctcactgcagcctgaaactcctgggttcaagtgattctcctgtctcagcctcctaagtagctaggactacagggacgtgccaccatgcctagctaatttttaaaatttttggtagagatggtagactggataaagaaaatgtatacaccatgtagaggcttgtcttaaacttacagcctcaaactatcctcctgtctcagcctcccaaagtactgggattacaggtgtgggacaccatgcccagcctgtggggagagaggtaggtgagaagagaaggcttctctgaagaagtgacatttgagcagacctatataagatggttatgaagattcacacagcggctcatgcctgtgatcccagcactttgggaggctgaggcaagtggagcacctgagatcatgagttcaagaccagcctggccaacatggtgaaaccccatctctactaaagatacaaaaattatccaggtgtggtggtgcacgcctataatcccagctactcagaaggctgagacaggagaattgcttcaacctgggaggtggaggttgtagtgagctgagattgtgccactgcattctagcctgggtgacagagtgagactctgtctcaaaaaaaaaaaaaaaaaaaaaaaaaaatccagagaaagcaaggtctgaactaagcacaccgcacatgcaaaggtcttgaggtgggaacaggtttgctatgtgaatacccatcagccaaagacaatcaggcatgcacctatgaacaaagttaggttttttgacttgctgcagtgagggcagatgtacaccatggggaatggtgtggtgtctcaggaaggtgtcagagaagactaacagaatttgggctgtgttgtatgattgtgggaaggattcaaagaagtggggatttgctttgggttgggtgctatcaaaaagtgtaaccaattcttttttttcaaacttttgattttaagttcaggggtatgtgtgcaggtttcttatagaggtaaatttatatcatgggggtttgttgtacatataatttcatcacccaggtattaagcctagtaccccttagctatttttcctgatcctctccctcctcccacactctaccctctgataggctccagtgtgtgttgttcccctttatgtatttgtgttctcatcatttagattccacttataagggagaacatgcggtatttagttttctctttctgcattagtttgctaaggataatgaccttcagctccattcttgttcctgcaaagggcatgatttcattcttttttatggctgcatagtattccatagtgtatatgtaccacatttttttaatccagtctaccattgatggacatttaggttgatcctatgtctttgctattgtgaatagtgctgcaatgaatataagtgtgcatgtgtctttatgatagaacaatttatatttctttgggtgtatacccagtaatgggcttgttaggttgaatggtagttctgtttttaggtctttgaggaattgccacactgtcttacatgctaattaacactcccaccaacagtgtgtaagcattcctttttctctgcaacctcgccagcatgttgttttttgactttttaataatagccattctgactgatgtgagatggtatctcatggtggttttgatttgcgtttcactaatgattagtgatgttgagcttttttatatgattcttggccagatgtatattttcttttgaaaagtgtttggtcatgtcctttgcccaccacgagtgtaaccaattctatcttttctagaaggtgagaagaacggagcaaagctaaaactgaaattggtaaagaaacagcagccattcagatcagctgagagaaggggatgcttgatattttgtggtttggacagtgttcctgttttgtctctgtgcaggcataattacagagcagtcttgtttctatctagatgcatcagagtcacagacaggcctttgttgttgttgttctgtgaacattgttcaccttcaacaggagaacatcatgacctaacagtgcattctagacaagctgctagcaacaccaagacccagttgttactgttaggccagctcccagctgttagaggctgctttctctttcttacatagatgaggaacttcagtgaagtctcttccagcaatgaaagactgatcaaatggctttcactctgtgaccctccgtttccttattttcaaaggattttaattgtactggccacatagtgctcttgtgtggatttgatgagatgttatctataaagtatcagccagtattattatctaggggttagcaatatggactcatcctccaaatatcagagttctgtgttgggactctggattactacttctgatcatggttgtgcagacacagggggtgggccatgattggcttaatccccaccagctgaactggcttccagaaggtataaagggatagccactggattttctccccttttgttccctttggaaggtggacatttagggattaggatattcaaaagcaactgtgcatacaagggaatttagaaagtcactgcacaagctcagggaaagatgcaaattcagaaaagacctaagatgatcataagctttcattttaggttgattctagcacagatacatcttataacaataaacaaacaaaaaaaccagcaaaccctggggaatggggaaaagctgatttccagagttagcacattgtaagattcaaatgtccattttcaacaaaaaagtcacaagacatacatacaaagaaacaagagagtatggcccattcaaagaaaaaataaataaacaatacctgaggaagcccaggtggtagacttactagacaaagacataaataactgtctcaaagatgctcaaacagctaaaggagacatagacgaagacagaaaaatgatgtatgaacaaaagaagaatatcagcaaaaagacagaaaatgcaaaaaggaaccaaaaggaaaattctggagctaaaaatacaattaactgaaataaaaaattcactgaaggggctcaaaaacagatttgagcaggcagaagaaaaatcagcaaacttggtgacaggaaaatttattgagtctgagggacaggaagaaaaaagattaaagaaagctgaacagagcctaaaggatctgtgggacaccacagaggagaccaacatacatattatgggaggtccagaaggagaagagagagaaaaagaggaagaaagaattgtaattttaagaaataagattgaaaacttcccaaatttgatgatagacatgaatcaacaaatctaaaaactcaataaactccaagtatgaaaaacccagagattcaagctgagacacattataatcaaactgtaaaaagccaaagccaaagaaacaatcttgaaagcagcaagagagaagcaacttgttacattcaagaaatcctcaataagattattggcagatttatcattagaaaccttggatgccaaaggcagtgggttaatacacttgacatgccaaaagaagaagaagaaaaaaaagacctatcaaccaagaattctatagctacccaatctatcctccaacaatgaggaagaagttcagatattcctggataaacaaaagctgagggagttcattaccactagtccttccctactagaaatgctaaacgaagtccttcaggttgaaatgaaagagtgcagacagtaatttgaagacatgaagaaaaaaattaaaatctctgctaaaggtaaatacatgagcaattataaaagctactgttatcataatttgagtttataatttcactttttattgtctacatgatataaaataaaatggatgaaaacaattattaatcttcattattgggaaaacaatgtatataggtgtgatttgtgacactgacaacagaaaaggaatgacagaggccaggtatggtggctcatgcctgtaatcccagcactttgggaggcagaggcaggtggatcacttgaggtacctgaggtcaggagttcaagagcagcctggccaacatggcgaaatctcatctctactaaaaatagaaaaataaaattagccgagcatggtggcagacacctgtaatcccagctactggggcggcagaggcagcagaattgcttgaacccaggtggcagaggctgcagtgagccaagattgcaccattgcactccagcctgggtgacagagcaaggctccatctcaaaaaaaaaaaaaaagaaagaaaaaggaaaaggagtgacagagctatataagagcagagtttatatatatactatcgaaattaagctggtataaatgtaaattggagtattataattttaggttttatatataatataatctcctctataaccacaaaataaaaagctacaaaatatacacaactggaaatgaaaagagaatcaaaacatttcgctacaaaaaaaaaattaaacataaacagtaatggagaaaatgagggacaaaaagccataaggtatatagaaaacaagtagcaaaatggcagtaattttgctgatagtcatttctttaaatcaagatggagatttccagaatgtatttttaaaaaccacccaacaatacgctgtctataaaggattcatgttagatccaaaggcacgaatatgttcaaagcaaaagatatggaaaatgatattccatgcaaacagtaaccaaaagatagcttgagtggctatgcgaatatcagacaaaatagactttaaatcaaaacaatttacaagagacaagacagacattacaaattaataaaaagttaaatatctcaataagatgtaacagttataaacatttctgcacctaataacagacctcaaaatataaagcaaaaattgatagactcaaaggagaaatacacagttctaccataatagttggagagttcaaaatcccactttcaataatggatagaacacacagacagaaagtaagtaaaaatatagtggacttgaacaacacaaaaaccaactagacctaacagatacatatggaacactcacccaattaaaaaaaaaatccaagtacacatgagacattctctatgatagatgacatgttgaggcataagttaaatctcagtagattttaaaatacctatcaaacgaactcttttctttgatcacaacaagataaagttagaaatcaataatagaaggaaaaatgaaaattcacaaatatgtgaaaattaaacaacattctcttaaacaaccaacaggtcaaagaagaaatcacaaaggaaatcagaaaatacttagggacaagtaggaaagaaaacaaaatataccaaacttatgagatgccccaaaaacagtgctcagagggaaattaatagctattaatgcccatgtaaaaagaataactatctcaaattaataacctgacttacatcttatggaactagaaaaagtagagcaaacaaaacccaaagccagcagaagaaaggaaataatagagactagagcagaaactcataaaatagagaaagagaatagacaaaaaaatctgtaaaaccaaaagttggttttttgaaaagattaacaaaattggcaaacctttggtgagactgatgaagcaccaaagagagaagacgcaaataactaaaatcagaaatgaaagtggcaataccactaattttaaaccacctagcaaagaaaaatcttaaaccagatggcttcatgagttagttcaaccaaacatttaaagaagaattcacacaaataattttcaaacttccaaaaaattgaagagaaggaaacactttctaactcattctgtgcagccagtattaccataataccaaagccaaataaagaaatcactagaaaagaaaattacagactaatatcccatatgaatatagatacaaaaatcctcaaaaaaattagcaaatcaagttcattagcatattaaaaggattactcaaatatccaagtatgatttatgcaggaatgcaagggtggttcaacataagaaaattaatcaatgtaatacatcacattattagaatgaaggtaaaaaacacacacatgatcatctgaattaatacagaaaaggtatttgacaaaattcaacacaccttcatgattaaaaaaaaaaaaacagaaaactaatcatacagggaaaattcctcaatgtgataaagggtatttatgaaaaactcacagctatcatcatactcaatggtgaaagattgaaagctttccccctaagatcaggagtaagacaaagatggccattttcaccatggctattgaacactgtattggaagttccacccagagctatcagacagaaaaaggaaataaaagtcattcagattggaaagaaagcagtaaaactatctctattcacagatgacacgatctatgtatagaaaatccaaaagaattcacaagacagctactacagttaataaacaagttgcagggtaccagatcaacacacaaaaatcagtcatgtttctatgcaccagcactgaacaatccgaagaggaaattgagaaaacaatttcatttacaacagcatctaaaacaattaaatacttaggaataaatctaaccaatgaggtgaaagacttgtacactgaaaatgacaaaagattgctaaaataaggcctggcacggtggctcaagcctgtaatcccagcactttggaaggccgaggcgggcggatcacgaggtcaggagatcgagaccatcctggctaacacgatgaaaccccatctctactaaaactacaaaaaattagccgggcgtggtggtgggcgcctgtagtcccagctactcaggaggctgaggcaggagaatggcgtgaacctgggaggcggagcttgcagtgagctgagattgggccactgcactccagcctgggtgacagagcaagactcagtctcaaaaaaaaaaaaaaaaaaaaaaaaagattgataaaataaattaacaagtatctaaataaatggcataaatggcaagatgtgttcatggatagaaagacttaacattaaaaatgtcaatactacccaaaacaatctacagattcaacacaatgctgatcaaaattccaacgtcttttcccaaagaaatggaagcagatcctcaaattcatatggagttttaaggggcccccaataaccaaaacaatactgaaagagaagaataaagttagaggactcacactttccatctgtgaacttactacagagctatagtaattaaaacatatggtacttgcataaggataggcgtatagatcaatgaaatagaatacagaaccgagaaacaaaccctcacatatatgattaattgatttttgacaaggaagccaagaccacttaatgggaaaaggacagtgttttcaacaaatggtagagggaaaactgaatatccatatgcaaaaaaatgaagttggacccttctaccacatactaaaattaaaatggcccaggccgggtgcagtggctcacacctatgtgagcactttgggaagccaaggcaggtagattacttgaggtcaggagttcgagaccagcctggccaacatggtgaaaccccatctcttctaaaaatacaaaaattaacccagtgtggtggcatgcacctgtaatcccaaatactcgggaggctgaggcatgagaatcggttgaacccggcaggtggaggttgcagtaagcggagatcacaccactgcactccaacctgggcgacaaagtgagactcagtctcaaaaaataaaatgaaataaaataaagtggctcaaagactcaatttaagagttaaaactataaaactcttagaagaaaatattgttgaaaatcttcatcacattggacttggcaacaactgcataaataggataccaaaagtacaaggaagaaaaaatagtaggtaaattgaacttcatcaaattaagaacttttgtgcaccaaaggacactatcaagaaagtgaaaaaacctggagaatggaagaaaatatttgcagatcatatatctaacaagggattaatattcaaaatatatatagaactcctacaacttgacaacaaaaaaacaaacaacccaattcaaaaatgggcaaagtacttgaatagacacttctccaaagaagatatactaatggacaataaattcgtggaaatatgctcaacatcgttagtcattggggaaatgcagattacaaccacaatgagatgccacttcacactaaccaggatggccataatcaagaaaatggataataagttttggtggggatgtggagaaattggaatcctccgtgcattgctggtgggaatgtacaatagtgcagtcattggggaaaacagtttggcagttcctcaaaaggttaaaaatagaactaccaagtcacccagcaattccattcttaggcatatattcaaaagaaatgaaagcagatatttgtacaccagtgttcacagctgcactatttacaatagtcaaaaggtagaaacaacctaggtccatccacaaatgaatggataaataaaacgtagcatatacatacaatggtacactagtccgctgtaaaaagaaattttgatcttactgcatgctacatggcttcgacatactacaacatggatggaccttgaaaacattattctttgtgaaataaactagacacaggacaaatgttagacgattccacttatatgaggcacctagaatgggcaatttggtaagcaaagtagaatagaaattactaggggcacaggtagcagggaatggggagttactgtttaatggtcacagagtttatgttggggatgatgaaacagtttcggggataaagagtggtgattggtacacgacattgtgaatatacttaatgccactgaattttacacttgaagtggttaaagcgataaatattatagtttgcatattttatcataaaaatatttttttaaacgatgaagggacgtgaacgggttgaaattttataaaaagtggccagggaaggtgtcactgcaatggtgtcctacaggaggaggaagatcatgtggacatctgcgggaagggtgttctggcagagggagtagcacgggcgatggctctgaggactgtgagaagtatagttggaaacagcgaggaggccagggtgtccgaagctgagtaagccagagagagtgggaggaggtgagataagagggggaaggtcagtttctgctgagagtgaggaggagccacaggagggctgtgagcaggtggacgtgatctggcttgagttttaacagggccagtagaacaaagcacgcctgggtaccgaaaccagccactggccagttggcaacctgggggagtctaacgcgaggaagcgcccagggttcccccaggatgcgctttccctcgccgccacctggagacagcagagtcacgcccagcgctgcgcaggctgatcgccgcgccgcgcccccgccctcggtcgcaggtggctcgttccgggaattcctaagcggaaaccggtcccaagccccgcgccttcgctcggcccctttaagagccagaatttccggagggctgacccgggggctagggatgcccaggggccgaaccacaagttgggaacgggtgggggaggtggcgaaaacttccgaagtggaattccaacttttcctggccctgattccccttgggcatccctgagggggcagagcttcccttccggggactttagagggttcctcaggtcatctaactgggagacacaggaggcccgaagcgccccccctccacccggtccggaggaaccccagtggaagtggagaagtcaggcgccaccaacaagcctctcccagccaggactttgcttagactcgctcctcccggcagggcgcacctaggcgggtccatcgccagccggggagaggggtttgggcagggagggaacaggtgcgcggcgggacccgccctatctcaacaggtgaatcgctccaagtgggtctcggttgcatggatctcggtgcgcttggtttggccggagcagatgggggccggaagggacctgtggtccgcaggcgccctcccagcgggccagtcacttggttcgggccctgggggacggagcgcacctgggtcagcccacttccggggagggaggcagaggaacccctccccgccgctcacccctaagcccagccctcggctcccacccttgtgtacctgggccgaaccattcaccggagcgcgcagcgggtggagtgtggctcggaggaccgcggcgggtcaagcacctttctcccccatatctgaaagcatgccctttgtccacgtcgtttacgctcattaaaacttccagaatgcaacaggacggacttggagtagggacaaggaacggaagtgggaaggggaggagcgtgcacccctcctggccttggtgcgcgccgcgccccctaaggtactttggaagggacgcgcgggccagacgcgcccagacggccgcgatggcgctgttggccggcgggctctccagagggctgggctcccacccggccgccgcaggccgggacgcggtcgtcttcgtgtggcttctgcttagcacctggtgcacaggtacggggcacggggcctctgacgctgcggaacgccggagggaactgtagagggggatggatggagttggaggcggcgggaagcgggaagcgggggtctcagaggctgggaccttccgatcccctgggtcttgggcgatctgttgcgcgcgggagtgagaggaattccccatttgtgccggggagcgctccccgcgcccttatctggaagatagcaggaagtgaaactccctggacggtgagacccggagcggcagggagaatggaactctttgtggggagggagtggaagaccgcccgatctctgggaaaagaaaagccgggatgggacttgggcgcacccggggatttctaagttttggagtaacggggagagggcacgggagggctggatcagacgcttcctagagggacagagacgaaggaacaatgcctaggcctcgggtgggtgtgggactggggactccccatcccccgcaccccacccacctcccgcgggctccggattatacgtgcgtaagagtctggtgggatggatttacggacttgaaaccgacttctgctggcaggctttcacctggatgggatatttgggtggtgatgaggtctttcccgagacacttttggttcagtcatttgaaatgactttagagtagggtgaggtggtgggaggctgatggagatattgtgggggctttagtccctccatggcaaagcagttcaggcaaacaactccatggttttccctccaaattcaaaaggccccgggtaacctggaatccttcgtagtcggttttgaagtggggccttgggcgctgggggcatcaacatggccatctgggcttgcctgcccaggccacacagaggccccttgttgtgggtgaatggcaaagggaagaggggactggtgtggttcagaggccacaggctgggaagagggatggcgggcgagtccaaggaaactggccgtgtcaccgtgcacctgccacttcagccccacgggtctataaaatgggcatgattatcgtggctacctcactggtcctggcaattaaggaacaatgtgtgccaggcactctgtaaaccacatacttgcgagtgtcaagctggtgacaggtggcgttcctgttgaagcacctccctgagctcacagcaacccttgctgtctctcctcttgccctcagctcctgccagggccatccaggtgaccgtgtccaacccctaccacgtggtgatcctcttccagcctgtgaccctgccctgtacctaccagatgacctcgacccccacgcaacccatcgtcatctggaagtacaagtctttctgccgggaccgcatcgccgatgccttctccccggccagcgtcgacaaccagctcaatgcccagctggcagccgggaacccaggctacaacccctacgttgagtgccaggacagcgtgcgcaccgtcagggtcgtggccaccaagcagggcaacgctgtgaccctgggagattactaccagggccggaggattaccatcaccggaagtatgttgggcagggcagggggatgaggctgggcttgcccgggtggtgggactggcgtccttgtgcgggacctggagtccccatctgaaagctcttgagtgccagtgtctgaaaggaccattgaagggagcaattctttttttttttttttttgaagatggagtcttgctctggactccaggctggagtgcagtggtgcgatctcagctcactgcaacctccacctcccaggttcaagcaattctcttgcctcagcctcccgagtagctgggactccaggtgcgtgccaccacgcccagttaatttttgtatttttagtagagatggggtttcaccatgttggccaggctggtctcaaactcctgacctcaaatgatctgcccgccttggcctcgcaaagtgctgagagacaccatacccagcctaaagggagcgattctattctactattcttccttctgctaatccttccattctttaatttaataacgaagattttttgagtacctgtcatataccaggtgctgttctgggccctgggaatacagctgttaacaaaatcatcaaaccacttccctcgtggagcccacattgcagtgagagagacaaacacgacacacactctcaagtccttgaagataaagaaaactgggtaacggagagaagaggccagggtttgttctataatcattaataacacgagcagtaagaagtaaaatttatctaagtaacaacttataaagggtctactgtgtgctaagctctcatccaggttcccaaggattaactcagaccacacagtaattgaatagattctatcattgtcatcttacagaggcccagagagagaaagtgacttgcctagtgtcatagctggtaacggggctgggattctaactcagccactttgggtctagtggccaagctcctaatccctttgcttgcctagggtggtccgcagaggactcacagaggagatggcaggagtgaactgcaggggcaagagagcttaatggagaaagcctgtgacatgccaggaactgcacacatattctcccattgagtcctctcctctaccctcctgacagctgaggcacagagaggttaccttgttcaaatgggtgcataggaagtcaaagtctggagctggggtttgaacccaggcagccctgagaaccttgttctttttttttgagacggagtctcgctctgtcgcccaggctggagtgcagtggcgggatctcggctcactgcaagctccgcctcccgggttcacgccattctcctgcctcagcctcccaagtagctgggactacaggcgcccgccactacgcccggctaattttttgtatttttagtagagacggggtttcaccg[140 bp omitted]gttgggactaagtaaggggcagtcattcattcattcatttggtatttatcaagcatcgactatgtgtcgttggtgctggggatagaggtgattgggatggctgaagtttctgtcgtcaaggagatgacattctggtggagtgagactggcagtaaataagcagataaagaaagagtatgagaatttcaaagtctgggcacggtggctcacgtctgtaatctcagcactttgggaggccaaggtgggtggatcacctgaggtcaggagttccagaccagcctggccaacatggtgaaaccccgtctctactaaaaatacaaagattagccaggcatggtggcacatgcctgtaatcccagctactcaggaggctgaggcatgagaatcgcttgaacccaggaggcagaggttgcagtgagctgagatcgcaccactgtactgcagtctgggcgacagagtgagactctgtctcaaaaaaaaaaaaaaaaaaaaagactccgtcaaggtataagaatgtcagagagtactaagtgttgcaaagaaaataacaccaggctgggtgcattggctcatgcctgtaaatttcagcactttgggaggccaaggcaggaggatcacttgagcctaggagtttgagaccagcctggacaacaaaatgagaccccatgtctacaaaaattttaaaaatttaaaaattagctgggcatggtggcatgtgcctgtggtcccggctgctcaggaggctgaggtgggaggattgcttgggcttgagaggtcaaggcttcagtgagtcatgatcgtgccactgcattccagcctgggtgacagagtgagaccctgtcttgaaatgaaaagaaaataggctgggcgcagtggctcacacctgtaatcccagcactttgggaggccgaggtgggtggatcacctgaggtcaggagatcgagaccagcctggccaacatggtgaaatcccatctctactaaaaatacaaaatttagccgggcgtggtggtgggcgcctgtaatcccagctactcgggaggctgaggcaggagaatcgcttgaacctgggaggcgaaggttgcggtgcgccaagattgcgccactgcactctagcctgggaaacagtgagactccgtcttaaaaaaaaaagaaaaaagaaaatagcactgggtgatgtgctacatggaatgacttgggctgtgaatatgatttgaggagggcctgggcctgggccttacagaacctagaaggcagagaggaaggggaggggcagggtgccagggatgaaggctcacgtacctcatgtcttagtgtgtgttcactgtcttaaacaagaatttaaagttgggcatggggcagagcggggaagggagcatccctttgcagaccccaagaagccaggaactggagcacattctgctagaggatcgatgggaagcagggttccaggggctgagcctatgtcagtcctgtttcagaggaggcaccaggcttgcttgccctgaatttctgtgggcagctcagccatgagcatcctactgttattgaggtcacagggctgcttaggccccctcctctctaacccagggattgtgcctgcctggaccaggcgtgactgctaagcttctgccaggacaagccaaatactgagggtgcttcctctgctggacgcaaaagtccaggatgaccccccaggctctgtctcggggaaggggccctgcatgctccaggggcctcacaggcctgggtctttcaaaccacccccacctgggcctgtgtttgatcaaggccctgagtgtaaacatccattgtgtgtgtcctttcaggaaatcccatagccataggagcttcctctgtttcagctttgaggatggggaaaagtggactccccgtggtgttcctagggtcacccactgtgctggggtttttctgttgttgttgttttttttctgttgcccaggctggagtgcagtggtgcaatctcagctcactgcaacctctgcctcgcaagttcaagtgattctcccgcctcagcctcctgagtagctgggattacaggtgcacaccaccacacctggctaatttttgtatctttttggtagagatgggatttcgccatgttggccaggctggtctcaaactcctgacctcaggtgatctgcctgccttggcctcccaaagttctgggattacagatgtgagccaccatgcccggcctatcctggtttcaaaagtgaaaatagtcctggataaggtagaaggctgtccactccaggcatccctccggtccggtggctcattccctgctttgtccttccatgctttgggtgatggaccagcacctggacaggaggccctgttccacctcctcgggctccttggggtccaagtgcccccacctccagctgcactgcagcagagagcccatgggacctctgaaatcatgaaggtcacctttgcggtgtataaagaaggaaccagaggttggagatgtggaggaggcctggctgctgttcccactggagacctggcatcttctccccgacctaaaacaatgaaagcagtgctcagcccggatgagatcacggccagcccaagaccaggaacagggtacgccctgcaggaagaaggtgtgcccagaccttaggatggatcaaaagaagccggaaaactatattttttgtgagttttgaaaatgtcagacaggtcaaacaaaacacagtgaggtccagcctcggcctacaagatgccagatttcaacccctggcctatatgatctgtttgccatggcaggcggttcctgtccacctcttttgtttatagcagggaccagctcttgagctccagtgttgaagaggcacggtcagggtctgatctgaagacactggtggctcatgcctgtaatcccagcacttcaggaggccgaggcaggaggattgcttgaggacaggagctgggagaccagcctgggcaacacagtgagacccagagactacaaaaaaataaatttagcggggcatgatggcacaccctgctactctggagatgggaagattgcttgagcctaggagttcgaagctgcagtgacccatgatcgcaccactgcactccagcctgggcgaccaagctaggccctctcaaaaaagatacaggtggaaaaatgatggacgaagagggcattgtggcaaacctggggatttaggagaacctagtttggaattctatgaggattcaatgaaagaatgtgtgtagaggggccca[131 bp omitted]gcaagatcccatctcaaaattaaaaaacaacaccaacaacaaaaaaacagtggcttagatgcctgatcattagggtaagtcgtgtcctcaaccccttcacatctgctctgaaggtcaccatatccggaagccttccctggcctccttgtttaaaatggcacagcccccactccacgcctggcactctctgctgtccctgattcgttttctccatacagcttatctttgtctgatatgtgacatagttaacattttatatttgtctttctttcctagttagaatctgaactctagaagggcaagggcaaggatttataactcaaaggttccgggcttaggcctcttttatattcttgattttgaggttaattaagagctcaggcctagcgaggtggctcatgcctggaatcccagcactttgggaggcccaggcgggcagatcacttgaggtcaggagttccagacctgcctggccaacacagtgaaaaacctgtctctactaaaaatacaaaaattagccagttatgttggcaggcgcctataatcccagctactcaagaggctgaggcaggagaatcgcttgaacccaggaggcagaggctgcagtgagccaagatcgtgccactgcactccagcctgggcaacagagcgagactccatctcaaaaaaaaaaaaaaaattaagagctcaaagagtttgttttcataggcagcagaatgagaaaagtttacaaaatagtttaaatgacaataaagtcattatagattaacataaataaaataccttttatgaaaaaaataatcattttctgaaatcagacaaaacattgtgaatgagaaggtggcatggttttatttttttgcaagtctccgaagcctggctggatagaagagcctggcttctcagagctgcttcagtctgttgtgatatctattgtatgtcacgtagcctctggaaaactccacagttagtattgttgggaaaataactttgacctcaggatctcctgaaaacgtcttggggaaccccagggtctagaggctgcagtttgagaactgttgctgtggtatcccaggtgtctcaaatactgcctagaacataggtggtactcagtaattattgttgaaggatgaatgaatgaatgaatgaatgaatgaatgaaagaaagaaagaaatgtgtctttgaatccagccatgtgcccagaatgatgagacagatgacaaaagctaagggactttagcatgaggagagggggttcgtttccttttttttcttttttttttgagatggagtctcactctactgcccaggctagagtgcagtggtgcaatctcagctcactgcaatctctgcctcctgagttcaagcaattctcctgcctcagcctccagggtagctgggactacaggtgcgtgccaccatgcctagctaattttttacatttttggtagagatggggttttaccatgttggccgggctggtctggaactcctgacctcaagtgatccacctgcctcagcctcccaaagtgttaggattacaggtgtgagccaccatgtccggccaagagggtgttcatttctgctccttgccaggtattgtgtcaggcactggggacccagcagtggctgagacagacagggctctgcctcacggagcccacattttcaccaggcaaaggatggtcggcccctaagctgggagataagacttcagcagttgggtgggggagccgtgggagaagcccagcccacagggggacagtgcaaatctagaaccaaggcgatggcaggggtgaggctggcacggtagctagagaccacgtcgtgccaagggccttggggaccatgggactatgggaccttagggaaggcgtctggaatgctgtagccagacactgttgcaaggaggatttttctgtagacatgaggccttccttatgaagaaagcaagggttctttcattcctgggggtgccaggtgctgtggactgcagcacgcgtggttgctgccgtcacagagctgtcatgcaggagggcagcgcgtccttgggaaggtggcaggcaggtcaggctaggaggaaagaggccgggaagctgagggcatttcctgcccgagatgcccaatgtagcctacttctgtccccagtggcttaaggcagagttgcctggtaggtgccctggtcccaccctggtgaaaggctgaaggtatttaattagtgcctgagaagcagagaggaaacaggatgtgccaaaacactttgatggatggtagagttaacaggctccttgcctgcagctgcttcagacaagagcgtccccaagccctgggcctgacctggaatgtggggatggaaggggagggggaggaaccaaggcactgggagggtaagtctctctctcccacatagacacacccactccttatgggtgcctgggcatctcctggtacctagaatctggcctgtttatctccacacccatccctggggtctacactaggccctgtgggtggcagttcacatcaggggagttctgactttggctctgagaggtg[135 bp omitted]tggcgaaactccatctctactaaaaatgcaaaaattagccaggtgtggtggcaggtgcctataatcccagctacatgggaggctgaggcaggagaattgcttgaatctgggaggcgaagattgtagtgagccgagattagttcgcaccattgcatgccagcctgggcaacaagagtgaaactccgattcaaacaaaaaaaaaaaaaagctgggcatggtggagtgcctgtagtcctaactactcaggtgggaggattgcttgagtccaggaggttgaagttgcagtgggctataattacaccactgcactccagccagggccacagagtgagaccctgtctctaaagaaagaaaaaaaaaaacaacctcaggctccgagggcaccattactgctctatactgaagagctgtgcagcttttccagacccgaaatgtcatccacaaaacagaagtgataatggtcctgcctcacagacttcttgcagtagtccaggtgtttagaacggggtgtaaaaggccgtgtgcccttggtaggaatctttgcatatgcatttgatcatctgcagcctgcccagcccactgcttgccccctcctgggtgtgctgggaaggggtctttggccctccaggggttaggtgccccagcctccaaggtgccctcacgccttttcatcccgactcagatgctgacctgacctttgaccagacggcgtggggggacagtggtgtgtattactgctccgtggtctcagcccaggacctccaggggaacaatgaggcctacgcagagctcatcgtccttggtgagtgggcctgggaagggggaggcatggcccttccttttgtccgcttctgttctgtctgccctcccctgtgtccgccctctgccctccagcttaccctctgggctctgtcgcctgctctgctctcccccaggctctgccagtcacttaggctcccctgtgccctgcaccccaggcagggaccactggcccacagtgcctccaatcacccaagccaaactaagagaagagtggagacaattggagactctgccttttcaaagtctcatttttaaaaaaaatccagacttggggtccgggtgcggtagttcatgcctgtaatcccagcactttgggaggccgaggcgggtggatcacttgaggccaggagttcgagactagcctggccaacgtggcaaaatcccgtctctataaaaaatataaaagccaggcgtggtggtgcacatgcctgtaatcccagttactcagaaggctgaggcatgaggattgcttgaacctgggaggcagaggatgcagtaagccaagatcaagccactgcactccagcctgggcgacagagtgagactctgtccaaaaaaaaaaaaaatccagacgtggtcagagtccatgggcagtgaatgaggacagttgatggtgtgcaaaatcgacccacctcttgctacatccccaaggcctcatctcacccgagtccctcgccaaagcacagcggttttgccgtgtgccctgctgggatggcgctgcatggcacacacactgtgtaagtttgagtgcagctgaaacgaagccgattccagacacccaggggcagggcggggtgtccgtgtggctgggaggcctccttgtgttagggggatgttgccatcggccaggtgccctgctgtaagccaacacatggagtcttgtatgacatgtgctctgcatgagtgatgccgctgggctgtacactgccatcttcacatgtgtgaatgagcacgtgactggggggtacttgggctgcaagacagagttcatgtgtgggggatggaacacgtgcaccagtgacccaggaacctctgcctgttcttcggtaaaatgcaccatttgcatcagcagttcccaaaattagtctccaggtctatttacactctaaaacattatcgagggtctccaagagcttttgtttgtttctgtgggttttatgtctatctgttgcttaacatattaggaattaaaatggggagattttccttttttttttttttttttgagatggagtctcgttctgtcgcccaggctggagtgcagtggctcgatctcggctcactgcaagcttcacctcctgggttcacgccattctcctgcctcagcctcccaggtagctgggactacaggcacccgccaccacacccggctaattttttttgtatttttagtagagactgggtttcaccatgttagccaggatggtctcgatctcctgacctcgtgatccacccacctgggcctcccaaagtgctgggattacaggcatgagccactgcccggccttaaaatggggagatttttcaagcccaagatacacaaggaagactgggcaacatggcaagaccctgactctacaaaaaattttaaaattaaccaggcatggtggcatgcacctgtgagcccagcttcttgggaggctgaggcaggagtatcgcttgcacccaggaggtcaaggctgcagtgagccgtgactatgctactgcactctagcatgagtgacagagaccctggctcaagaaacacaaacacacacacacacacacacacgcatatagtccattaggcatcagggcgatgatggcatcagggagcctgggaaactctactggacattcatgggagaacaagtgaaaaaggcaaataacatcttagtgttattctaaaatttcttcttttggccttgtggacaggaccacgctttgagagctgtgactgacatgcctctgtcctgttgcgagggcctatagtgccaagtgcatgagctctggggagggcttcgtgggtgcagagctgggcctgtggaggcccctcagacacaacactggtggggctcagagctccaggggcactcgagggaagacaagaaccggctctgagatgcgtgaatgtgacagtgcatgagtagagatggagaccttgtgggtcccagaaccaggactgcatatgactttcatatgtgggtatttttgccttcatgggtcccttcctgttttaaaaaaaatgtgtgattatgttgtcacaaagagtttattcctgtatattgtgttaatttgtgttcagatttgtaaagtaaaattaaaccatttcagccaggtgtggtgacacatgcctgtagccctagctacttaccccagaggctgaggtgggaggatcgcctgagcccacgaggttgaagctgcagtgagccatgatcacacccctgcactccagactgggcgacagagctgagatcctatttcgtgggccctaggtccctgtgcctgctggaacaggacatccctatcaccgtggttggagccctttggggtgctaagacctatgaatgagggaaacttagggtgcccaagctgaggtagagccctcagaaccccctgggatttgtattggagccctcgtggcataacacaggtggattatgcaatgggagtttcttacctataagcacccacatgtgggcgggtggagggtaggagccatgcactagggcttcagcccccagccccttcccgcttcagggcacaccttgcacttggccagcctggagctgggctttcgggggtggcacagcctgggctggctctggccagcataatctgtttctcttttgtccctccagggaggacctcaggggtggctgagctcttacctggttttcaggcggggcccatagaaggtacggggggtggatcctgagttgggcttctcgggagctcccatacatcacctactgcttctgactctagttagtatccccttccccactaaaccctgctcactgtggacccctcactaacctggcctgactgtggctctgaggcatctagtggtctggcgctgggcctaggctaggctgggctgaggagagcctggggtgcaggccagggctctgtgactggcacctgcggtgctcttgagggtgtggcgtctgggcagctggctctctctttggtctgggggctgcagtctgtctccctctgtgcaggctgcctcgttttctgccttgtgttttttgcacctgggggagggccgtaactggggaatggccgggatggtagaatggggagtgtgctgtgcccagcctctggcacaaaaaatccagccagggctgcaggttccttggtgagctttgcaaatcgtccccgacctcagtgctggctccgcaccatgtacccctgctgtgccgttagccctgttccctcccaggcctccgggctcagggcctgttgtctttctgcagactggctcttcgtggttgtggtatgcctggctgccttcctcatcttcctcctcctgggcatctgctggtgccagtgctgcccgcacacttgctgctgctacgtcaggtgcccctgctgcccagacaagtgctgctgccccgaggcccgtaagtgtcccgctcatggccaccctggtttgggcaacatcctgcatccaagggaaggaggtggccatccacctgcccccaggacagtggcgttggtctggagggtgtgaatttagccagtggggagaaagtaggctgaggagggtctgctgtttagattgtcgtttacttcctccaacttttagtttatttttatttatgttgttcttttcttttgtaagtataatccatacacatggtaaaaatgtccaacagtacaagatactagtcacatggaagtaaagccctctaaaaaaaccaaatcttggctaggcgcagtgattacgcctgtaatcccagcactttgggaggccaagacgagtggatcacttgaggtcaggagttccagatcagcctggccaacatggtaaaacccagttctctactaaaaatacaaaaattagctgggcatggtggtgatcgcctgtaatcccagctactcaggagactgaggcatgagaatcgcttaaacccaagaagtggaggttgcagtgagctgagatcacgccactgcactccagcctgggcgacagagtgagactctgtctcaaaaaaaaaagaaaaaaaaatgttaagtgaaaaagttaagaaaccaaacaaggtttacaacactacatgatttaagcaaaaaaaattttttttgttttagagaaagggtctcattctgtcatccaggcagtgcagtgcgatcatagctctctgcagcctcaaactcccgggttcaagcagtcctcccgcctcagcctctggagcagctgggactgtaggcacacaccaccatgcccagctaattttttgatttttgttttttgtagagacggggtctcagtatgttgcccagcctgatctcaaactcctggcctcaggtgatcctcccaagtcagcctccccaaagtgctgggattacaggcatgtgccaccatgctggccaatttttaaaaattttctgtagagacagggtcttgctatgttgcccaggctggtcttgaactcttgacctcaagtgatcctgcctcaggctcccaaagtgatgggattacaggcatgaactaccacacctggccttaaacttaagcaaatttttttttttttttggagacagtttcactctgtcgcccaggctggagtaaagtggcgtgatctctgctcactgcaacctccgccccccgggtttaagctattctcctgcctcagcctcccgagtagctgggatataggcgcctgccaccacgcctgactaatttttgtatttttagtagagacggggttttgccatgttggccaggctggtctcgaactcctgacctcaggcagtccgctcccccgcacccctaccttggcctcccaaagtgttaggactacaggtgtgagccaccatgcctggccaaatttaagcaaatgtttgaaaacacatacccacaggaatgctgcacattttacccagctactatgtctagggtcgtatctagcacaccagcatggctactgtggagagctgggactggatgtgagatgagagctaaaggggaagtaagcaaaccaagcaggggaaggtaagagaagacagaagacagagagagagggacctaactctatgagaggagtcagacatgtgcaattgaaaaagacttgctcctgtctctcttctgtgaatgtttgtgaatatcccaacgggacactttcacagaggagctgattgacgtggtcacagccatcagccttgggacaccagaccacagtgtgtacactaagtggcactgatggacacttcagcatccctctagctgctgtcccgtttcccctcctcggggaccacagctgttgccagtccttggtttccttcaggagggtgtctgggtagaccagcctgtgtgcacacagtccaagatacatgaacagtgaagtgccaggcaatccttgcaagcatgggcaggtggagagctgaggcctgcttgacaccttcctgctcagaagcccagtgagcagtttccctccctagggctcagtgtcatcccctataaaatggggcttatggcagagctcaccacactgggtgcatctggggatttggcgagctcatgtgcacaccattgagcatggggcccaacctatataaaatattctacgtctgtcagctgctgggcactgccactatcagcctcagtagtgactgagggacagggcaccagtcagagccctggtgcacacagagtgaccccagagaagcagccttccctctctgagtcctgtttccttctgttaggtcctgacttcatgggttgttgttagcattaaggaagtcgctggctaattttatagtcattgaagtcagtggtgtgcaacctggttcctcaaaggatcacttccctgaaaaaattccactgctccctggaggcttatgcaggccatcccatcccctccctcttgttgtgttcagctgacagctttttgctcagtgagtaagtgttaggtccatttcacagatgggctgcaaccaagtttgcagtgaacccactaagaccagagctagggccaggactaaatgctggtcccaatgccacattcccctgtccccacaccacatttcctccatccggagaccctgttaccccaacccagggccccattaactccctggcagaggccctgttacatctgctgctgccacagcctccgcccacccttcaggaggcagcaggtcccactgctgatgataaagttgcaggctgcctgagctaatgaaggggcttcctctaggctgtgcacttagtcttctgcttccaaaccaaatcagaggtgaggcaccctctctgggcccatctctctcctccattttcctgttggggtcccagggaggaagccacttgcctagggcccaggaattttgcaagcctcttgccctagggaggaaggaagggaggaggatcttaccttgaactgtcaagcctagagcctggtggggcaggcagaaatgggtgcagtccatgagttagaaacactagaggagacactttgctgcttggccggggcaggcaagttaattcccgaggctcctgccactgcatctcaatctggaaggtgaccaggtgggcaggacccacgtctcccagatgactcattttttctagaacaggggcttggctgccaaagaggatacttgatttcggcttgtggggacagtggtggacccagcatctgggctttatataaagggcagctttgttgccctgtaaacacacagaccatgggtggccacttcttccagtaagttagctggggagttggaagtttaggtaaaaccttttgattgacaaatgttggcgaattaccatgctgttaaatgaaacattgttctgccaccctggggctgtgggtgcctgcgtgcaccctctgaaaaatcacacaggaagtggggtggggtctctgtgaagctggtgtcccccagcctcagggatgctgcagaaatggaatgaggaccaacagggactcagatgtccaaggaagctctacagcggagaggacggcttgggaaggaggtccaggcccaggtccctccggaacccaatgggtatggggcagcctggctcctgcctcatcccccttctcctgttgattgtgtcctcacagtgtatgccgccggcaaagcagccacctcaggtgttcccagcatttatgcccccagcacctatgcccacctgtctcccgccaagaccccacccccaccagctatgattcccatgggccctgcctacaacgggtaccctggaggataccctggagacgttgacaggagtagctcaggtgaggccgggggaagcaggaacagctggtgggagtgtgctgggcatctggacactgaggggcaggggctggaaggaagagtgtcttgggagccgaggaggggctctgctcctggtgcgcggccactgacagccactctcccccagctggtggccaaggctcctatgtacccctgcttcgggacacggacagcagtgtggcctctggtgagaatccatcgtcccgaagttggatgtgcctgtaagggagaggggtgggccaggatccatcctcccaaaccgaccaccacccccctgtccctagaagtccgcagtggctacaggattcaggccagccagcaggacgactccatgcgggtcctgtactacatggagaaggagctggccaacttcgacccttctcgacctggcccccccagtggccgtgtggagcggggtaagcaggagccttggggtctgagggcttttaaggtgggggggtgaaacatgtctccctgatacctgccgcagggactcttggtgcaaaccctggaccccgggctcctccagcagtcagtgacaccccccttccctgcagccatgagtgaagtcacctccctccacgaggacgactggcgatctcggccttcccggggccctgccctcaccccgatccgggatgaggagtggggtggccactccccccggagtcccaggggatgggaccaggagcccgccagggagcaggcaggcgggggctggcgggccaggcggccccgggcccgctccgtggacgccctggacgacctcaccccgccgagcaccgccgagtcagggagcaggtctcccacgagtaatggtgggagaagccgggcctacatgcccccgcggagccgcagccgggacgacctctatgaccaagacgactcgagggacttcccacgctcccgggacccccactacgacgacttcaggtctcgggagcgccctcctgccgaccccaggtcccaccaccaccgtacccgggaccctcgggacaacggctccaggtccggggacctcccctatgatgggcggctactggaggaggctgtgaggaagaaggggtcggaggagaggaggagaccccacaaggaggaggaggaagaggcctactacccgcccgcgccgcccccgtactcggagaccgactcgcaggcgtcccgagagcgcaggctcaagaaggtgagggccgccctccctggcgtccagaccgtccctgggcccccagccggtccccgcggctcatacccttctttctttctcccttgcagaacttggccctgagtcgggaaagtttagtcgtctgatctgacgttttctacgtagcttttgtatttttttttttaatttgaaggaacactgatgaagccctgccatacccctcccgagtctaataaaacgtataatcacaagctctggagagaaccatttgttcggccgcgcggggcgggggaccggggctgctcccgtatgcgtctgtaaagcgccgcgtcccgggggcaccggagtccggggccgggaggaagagacccagcctggcccggcccgcgcccgcgccgccggccggagaacgtgccccgcgcagccgccgcccgcctgcgtgcgcgccccggccccgcccaggcgtgcgcatgcgccccggccctccgccttcgcgcaccgcaggctggccgtccgggacgcgcgcgcgctcctctccccttccagcccatcccccccagccccccaccgacctactttactgtctccaaactcgggcagcccacctggcccccgacgaccccagcccctgcaccgggtaccccgacgttccatccagacccgcgtttcaccagggcggcgcgcggcgacctcgcgccccgcggagccccgggctcgcgcgcgcccgcccgcccccggagacagaccagcgcgcgcgccccgggccgcctccccccagcgcgcgtccgccccggggctcgcgccgccgccgccgccgccgccgcgcgcgcgcagctcaagtaaaggaggaaaaaaaaaagggggaaaaatagaaagcggcggcggctgcagcagcgatccgccgccggactgggccaagccgggcggcggccgcgcgagccggcgatccagggcactggcggcggccagccagggcgggccgtgttcaaaaaaaaaagtcgcggcggcggcggctgctcagggaaggaggcctgagggccgcgtgcagcgggcgggcagctgggtgggctgggggcggccgcgcggcgtcccggagcctcgggccgcccggagccggcgggcgggcggaggcggaggcggcggcggctgcagcggctgcaggagcggcggcggctgcggcggcggcggcggcatctcctcctcacatgaccccactgtttgtccccgtgatcagcgcgagcggctcccgtatctcctccgtcccctcctgccgcgcggcgtgagcgccgggctcggggcccccccggccgcccgccccctcccctccctccctcccctcccctcccctcccccccgggccccgcgccccccccgcccccgccccccccatggacatgctggacccgggtctggatcccgctgcctcggccaccgctgctgccgccgccaggtaagatccccggcccggccgtgcccccgcgccccggccccggccccggccccgcggcctgcaggccggggccgccatgatcccgagcggccgcgggcccggctcaaaatggaggccgccggcgcgggggggacctggcgcctcccgcccccggcccccggcctcggcggcgcccccggcctcaggcgcggccgggtgggactggggccctgcagctgggcgcgggggcgggggcgcgggcgcgggccgcgctgaccctgctccctcctgtgcccctggcagccacgacaagggacccgaggcggaggagggcgtcgagctgcaggaaggtgagtgcttgccgggccggccgcgcccggggagggctgggggcgctcggcgcggccctgaccgtgccccgaccctcctcggccccaggcggggacggcccaggagcggaggagcagacagcggtggccatcaccagcgtccagcaggcggcgttcggcgaccacaacatccagtaccagttccgcacagagacaaatggaggacaggtgagcggcgggccgcgagggcgaacgggcgggcgggcgggcgcgccgggaaggctcggacctggccccagcgccggcctcgccgctctgccgccccctgcaggtgacataccgcgtagtccaggtgactgatggtcagctggacggccagggcgacacagctggcgccgtcagcgtcgtgtccaccgctgccttcgcgggggggcagcaggctgtgacccaggtgggtgtggacggggcagcccagcgcccgggccccgccgctgcctctgtgcccccaggtcctgcagcgcccttcccgctggtaggtgccctgccacccctgggtgggggggggagggagtggagaggggacactggctctgctcttggggagccccgggggtggggcaggtgtcgcccagcggatgctgccttcaggcctcaggctgcatggggccagatccctgttgtgcaccgtgaaacctggggacagtgctcttggaatttttttttcccgcaaaatgggaatgatgtgtcttaagaggaaagtttcttagagtgcgaaacggatttgctcagcaagtgatcgctgacctcccgccatgttccagggctgtttgaaacacaggacagaatgctacacgcagaaggagtccccactcctgttaattgcagagaatgcagtaaaccccaagcacagcaatgaggggacgggatggaggaacagagaaagctaagggtagcctctgccctcctactccccaggctgtgatccaaaatcccttcagcaatggtggcagtccggcggccgaggctgtcagcggggaggcacgatttgcctatttcccagcgtccagtgtgggagatactacggctgtgtccgtacagaccacagaccagagcttgcaggctggaggtgaggagtagaagtcagattggcaggtgggggaggcaacgggcccagcagggagggaagcccccccagccagttctgacttcaccctgccttgccactaaccccccactctccctgcaggccagttctacgtcatgatgacgccccaggatgtgcttcagacaggaacacagaggacgatcgccccccggacacacccttactctccgtatgtgcaggggacacctggagggcctggtgttgaaatggaaggaagaggggtttctggagtagaagctgggcagttagcatgaagtgggcacatggtgtaatgttttttttctttgcctgtttctgctgctctagtgcacataaagtatcatgtcttttgtttttgcagatggatttaccttgcaaagataattttcaaatctaatacttagcagatgcttgggcaaacagctctgcgataatacatgccccctttttttttcctcctcttgtagaaaaattgatggaaccagaacaccccgagatgagaggagaagagcccagcacaacgaaggtgaggacaaggtgtggctccgggtccccctgaccaccaccctcacaggctcagccagccctggagtgtggagtgacagagagagaagccactcctgggcaggccacaagtgctccagagggctttgctggacgctgtaaaggtagaaagtgagcaacgaggggagagtacagtgtcagaagtagagggacagggagtgtgaattggaactggccatttgttgacccggctggtgatcttgaattcatggcccacatctaagatggtggacttcacactcccatacggattgcctgccccacttgaaaaatggggctgaccgggctcacgtgggctgacctttccacgtggcagctgtcatgctcacatcccgcactcccatgcctgcctggcctccagaagtaggtctgttcccccagggagcacatctgagggagaaactgcatgaagttctgcctctggctacctaaggccggagcatcctgccctttccagaaacaccaggtctcacctcaggtcatttggccttcagcactgtcccgccccgcctgtcagtagccactgcagtgggcacagcactgtgcaagtgccaggagagtgcttacacccaaacaaccatcattcaacaaatatttactgcccgtgggttctgggctgagcggcacaggccctgtgccaggtctggagtctggcctggagcgtcagggaggctcaaaggcctgagggcttatgtctcatgggtctcatgggacattgatggggggtgggctggggtgacgcttccctagggagaggggagtgtgggtcaggttactttgtggggtgctggtttggttgtgggagaagttccatttagaatgcctcaggagggaagatcgggaaggcctcgaatgcccgagtgaggggctgaatgctgagtcctaaaggtggtgatgggactggggtctgtggcccaggtagttgtgttctgagcagctcctccctgagttcaggcgttcattcagcgcgtgcatactacgaccagccccccttttgcgtcctcagatatggcaatgcagcagatgataggacagacaaggtctcagctctctgtgcgcgttctggtgggagagatgggagtcacacagccgcatcaggcagtgcaggcagtcacaggcaggagaggaaagctggggaagaaggtggcgggtgatggcggcatggtagtgtgctctgaagggctcttcgagaggtgacattgaagcagatccctgaagcgacctgagggaaggggcctgttgagaacctcaggagagtcccgggcagagggaagagctagaacacaggccaggccctgagccagggccgccatggtgtgtctgcagaagagcagaattcaggaaaggaaagaggaagttggcgcagtggagggggctgcccaggccagatggtggaggaccttggaagaagtccccagtgtggctgtctgggctcctgtggttttattccagggtgatgagaagccagcagaggggtttgggttgtggaggctgttggcaagagtggtgggaaggggctgggaggtaggagaccatacgactgtcaggcctgagacagggcaggggttgggggaaatgtggggaggactccaaggctggagaataagggtttcgtgctgaactcccctccatgcttggaagggaaggggtgcatctgagcttggttttgagatgcagtgagtttgaggggcccccagagcagccccagccccacgacttacctgtggtggggcgtcagggtggttcttaatctccgtacctgtcttccctctgtgaaatggtggaagcacagccgccccgggcacctggtggggatgcagtgagtcttggtggccacacagtaaggcgaagagaggactcagaaccctcccaccccactctcacccccgcctctcccttagttaatctgactccaggcagccttgaaactttctcaccctgtgaagcagtcttcatcacctgcccacttctccagctccgtcctgtctccgctttcctgacttgcagagcatctgccccaatctgctcatcctcccagtaccctcagccatctggctcatggctctaccaaaacagctccacttccggtcacccgtggtgaccccattgccacatccactggcctcctttgctgtctgggctccaagcatctgatgctgcctgtttccctctgttcctttctggaatcttcctttctcctccatcctctctgattctcctgtgatctttgcctttcctaccccactgttaacagtgaaatttccagggctgtcccagttccaagtgagtagatgggggtgccggggaatctgtgttttccatcagctcttcaggtgatttgtcatagtggacaagcttgagaaactgctttggctgcgagtgtttctttttttttgagaagggggtctcactctgtcacccaggctggagtacagtggcacaatcacagctcactgcagccttgacctcccaggctcaagcgatcctcacacctcaggcttctgagtggctgggaccacaggcaggcgtcatcacatggggtaatttttttttatctgtagagtggaggtcttgctatgctgcccaggctcgtcttgaacttctggcctcaggcagtcctccggcctcggctacaggcctgagctgccacacccagtcttgctggtgtttcataaggtccggcccctcccgtcggcctcaggtgtatgacttgtgaggcccagcgatgggctcggaagctcttggtcagtatcccccaaactctgttcccccttgtaggtgttcctcttttttctttgctgcagaagagtgtgtgactcacaaaaagttgaggactgttccttgatgtcctcccaggcttcgcccaccacctggctcctggtaatgcaaggaactgtgtttccatccattcccttcctttcactgcaactccagccccacgttttgaactacctattcgagatttctgtctctggacatccctgtaatgcctcaaactcaactcgcccaaaagagaatgtgccatctcccgtctccaaaggctttcatgcaaccttcttctttgcagagcagcaaaagctacccctgtcacagctgcccaagccagaaactaagaccagagccgctttcaactctgccctcttcttcccttatggccacaaaccccaagtttctcttctgtggtgatttcagatccgcttctctcacttctttttccctccttcccaccacttcttggtactgcaggagcttatcccagagtcacagactcaaatgcctgcaggggcctgagggagggaggtgcacttggcatctcaggaaggggtgtgtggctgggtgtggtggctcccgcccggaatcccagcacttttgggattacattttggccaagacggacggatcacttgagcccaggagtttgagaccatcctaggcaatgtgacaaaaccctgtctctaccaaaaaaattaaaaattagccaggcctggtggtacatgcctgtaacagtcccagctacttgggaacctgtggtgggaagatggcttgagtccgggagacagaggttgcagtgagctgagattaccctccagcctgagcaacagacccagaccttgtgtcagaaaaagataggaaaggttgtggggggcccccagtgatctggggcatgtgtgcgctgcctgaagggtggcccttgcccagtgccttccccttgctgccctgtcagaatctagggccactgttgccagaaactctgagaagctagaaatcgagacttatgtgaaatctgatttttaggtgccagattagattgctttttccgtttcattgatttctactcttaatgttactaattcatgcttctactcacttggttttttgtttgtttgttgttttgttttgagatggaatctcgctctgtcacagtggcgcaatctcagcttactacaacctctgcctccccggttcaagtgattctcctgcctcagtctcccaagtagctgggactacaggtgcccgctgccacacctagctagtttttgtatttttggtagagacggggtttcaccatgttggccaggctggtctcgaactcctggcctcaggttatccacctgcctcagcctcccaaagtgctgggattacaggagtgagccactgcacccggccccttctactcactttggattcaatttgctaggtttcatgctttagcttccctggcacaccccaaccccagctttttaaggtaattctttttttttttttttttccaattttctactaaaatctttattttacaggattaatgtttcacagcagggattgagatgattcttaacctttctctttgcttaacaacatttagagttgccagttcactccagcatcactttagctacatcccactgggatatgttgtttttgttatcattcagtttaaagtgttttccaattttccttgtgatttcttctttgacctttctgttatttggaggcaggttgcttaatttccaaatatttgtgggtttttcagatatctttttgttattgatttttaatttagttctgttatggtcagagaacatactctgtatgatttcagttccttgaaattcgatgagacttacccgacgggcccgaatgtgtcctagcttggcggaagcttctggggcattgacgaggacaggtgtctgctgctgtcaggcagaatgtccccccaggtcagtgaggtcaggctggttgagtgttcaggctttctattctgatttttgttgttgttgtttacttgttccaccaatcaatgagaaagatgtccatgtctctcactatatttgtggatttgtccatttcttccttcagtcctggcaggtttcgcttctgaattttctcttttttttttttttttttttgagacagagtctcgctctgtcacccaagctggtgtgcaatgatgtggtctcggctcactacaacctccacctcttgggttcaagcaattctcgtgcttcagcctcccaagtcgctgggattataggcatgcactgctatgcctggctaatttttgcatttttagtagagccggggtt[136 bp omitted]tgtggaatgaacgtggccttggtcctaatgggtcttcctgtatttcaaatgtgccatgatggtcttccgaagccacaggctggacagcattaccgcctgctaatgtcagggcctggattcaagggcctgggactctggaggaggaggagatgcggtcctgacctgcgagcagagcacacaaggccttgacaaccgatctttacaaccttttcccacccctgcataccctgaaatggttttcaggccaccatttctgggatcttcccagctgcctgccttagagtctttctctcagaaaccagcccgaatgtttcctggatctctgaggattcatcccacccccattcccatgcagaggccatggctcggcgcctggcgttcccgaggcactttgtaccatcttcagtgatgacacgaatgcaatggggttagtgccacttgcccacagtggtgctgcgagtgcccatggggcgcaccggggctgcttccaccctggaccccagcctggcggagggcctggcacatagtagggcggggagtaggtgtgtaagaagtaagcttgctctggagaggatgtacctgcagccggcgcccagctctcgagaggactgtgggagggcagaggctgaaacgaggccgcctgccgagttcctccacagacccctgggcgaggagcgctctgctggggactgcgccagcggtgcctccaggcctggactctcagctccgctgctgcttttggccagagttcccaaaggcgggtgtggttgtctttggtgggaaggttcagcgcaccgcgatagtaataggggagcaagcactcgctgagcccagtgcagggcctggaccgtgctccatagcaagcactgatcttgggctattggttttggaggaaagagggagcacaaggatggaaggggccagggaagagaggtcacggtgggagaaggagagtccgcatccatcggagggtttgtcactcaggcctgagtgggaggcactggaggcagggagaggccagtcagcagcatgcggccacagcccagagaagccagaggggtttgctggtgggtgggccccagccttttcaagggaacggcaggtctggggagctgccgatctcggggtgtgagggtaacgggcaggctgtggcccacccctccttctcaggctcactggacccctgaccggtttcatcaccattatccaaggctttgaaaagaccccctggccttcctgccacatgtgccctagctatagggcttcgttcccctccacaaatggtgcagacagcatgagccaccctggcagggggctgggggtccgtggggtaggagttgggggtagctgagcgttctttcctgtccccacggtgcctggtgctggggcttggcagccagggttgggacagcctggctttagcaggtcctgagtcaggggtctcaggctccgcagcacacagtccccaggcaggtgtcaggatgggatgtggccagagaaaggcatgtgctctgtctggggatagctgccacccagctgacacagttggcatgagattgtggagttttatggagtaaaatcacaaatctgggttttttaagtaaaaccttctatgagttgccatctctggccttcaacataggatttgggtctttcctgggtgagctggtgctttgtgggccaggccctgggagctgcaagtaccagttgggatctgccattgccctgtggaaggattttaagcaggggtgaaacatggtcagacttggatttagagatgaggaaaaaaaacaaaatcacggtgccagagtctctggggagactggagaatgcagtgcaggggccgcaggagccaaaaaggggcactggtcctgcgaagagtggctctgtccatccctgccttccagtatgtgcccactgtgaccagagctccatttctcaaaagaagccagtgatgccaattaccatgagaaatttccttatttttaactgtcgattaaaatttgtacaagtatggtggggcaggcctgcaaaatgatctccaagtgcctggcctttgatgcccgtcctaaaagcatgtgtggcactggagggcccacgtttctttgttcctcttgagaagctggggtgggggccggctgggctcagggtgcggcccctcacttcccagggctgtggtctcggtggggcctgcactgttcctgggtgtccttgggctgagcctctgccctgtgaggacggccgctcaggcatgatccgtcagcgaagccgtggctgtgactctgttttccgcagtggagcggaggcggagggacaagatcaacaactggatcgtccagctttcgaaaatcattccagactgtaacgcagacaacagcaagacgggagcggtgagcaccccggaccctcagtgtctgcggtggtcccggcccccgacccttgcatgcagaaagtccaacagccatggggctcgggagtcatccctggggtggaggccggtgggcggtgcctgccctaaggctcctggtcccctcgccccccagagtaaaggagggatcctgtccaaggcctgcgattacatccgggagttgcgccagaccaaccagcgcatgcaggagaccttcaaagaggccgagcggctgcagatggacaacgagctcctgaggcagcaggtgggtgcggggcctggagcgggtcagggcccaggagccccagatgcaaggcgctggccctcagctcccttgacctccgtcgtgtccgccagatcgaggagctgaagaatgagaacgccctgcttcgagcccagctgcagcagcacaacctggagatggtgggcgagggcacccggcagtgacgcccgccaccaccacgcagccgccgccgcccacgccggcctctgctgcccccttccccagcccttagcacagagagggacacatgcccctcccccagctgcgtttttttatagtagatttttaacaaaaaacggggagaaataatgcatttctgtggatacagtgcccaccgccctcctccacttggaaacggtatcctccctgcccatccgtctgtctgtcgcccttctcccggccctcactaagccccggcacttctagtggtctcacctggaggcaagagggaggggacagaggccctgccacgtcccgctgcctcctgctctctggaggtactgagacagggtgctgatgggaaggaggggagcctttggggggccacccggggcctggacctatgcagggaggccacgtcccaccccacctcttgtttctgggtccctgctcccctttgggggtgtgtgtgtgtgttttaattttctttatggaaaaattgacaaaaaaaaaatagagagagaggtatttaactgcaataaactggccccatgtggcccccgccttgtctgcttgtgtgtttgtccatctcaggagtggggagggggcctggggtctgcagagctccacgaggcatggttctgctgttgtgcacatggctgtgcatggtccctgccagctgcaccacccattacccagtggttggttggatggatggaggaattaaggaatgaatgtcccctttgaggccctagacgtgcatgagggtgtggggagctggggtcaaggacatgtcccatgttggaggagaggcaggggtctccgtgtcaacagttcctgaaaacacaaccagcccctggccctgccctgctgggccaaagccctcccctctgcaccagccaatagtggggcctggccttgagcccctcacccccagggagggcagatggccagggcgccaagcttggcccgtcagcctgtcgccttgcaccaaggctctggcgcctgtgctgtgacccctgcccctgctgatgatgaaacctgtcctcagctgagatgcagcgatgcctggtagggctgggggctgctcctgtgtctccccaggtgagcacacccctattcactgggccctgcttcagcctgcagcacccttcaactcccaggagctgggcttgccactctgctcaccttgtggagctccatctgcctttcctccccaattcccccactccctgcactcgtctcttcccacaagagccctgtctccttttcctagctattcccatctgaggccatctttattcatttagtttttagagacagggtttcactctcacccaggctggggtgcagtggcacacaatcacggctcactgcagccttgaccaactacaggtgcgtagcaccacagccaagtttttgtatagatggggtctcgctttgttacccaggctgtgacaagaggagcctcccacgtggtgtggatgaggaggcagatggcagggcctgtgcatttctgtgcttgagtgggccttgaaagtggttcagcaaccaggaagaagtgttcattcctcgacaacaacatccccgggctctggtgacttggctgacactggatggccctggaatgaaaaaggcaaagaggcaaaatgtgcaagggcccatctggaaccaaggtttgttgatcccctgggccgtgtgcaccctgagctgggcctggtagtggaaaggaatgaaggcactgcagtcaggcagcctgggttcatcccccagctagtggtgtcctaaggaaccggctccccaaaaacatccctggcttgtagtgcttgccaatttctgggtgtcaagactcccactgctgctgatttcaggataccagcatgatgccactgaatgcagagtttcgagatgtgcatggtctgctatgttgagccaggtctagcataccgctgtgccctgctgtgttttaggggagatggggaaacctggtgggtaagagcaaaagccctggagtcaggctgtccaggctagaatctcagctctgcctctggctgagcaagcttgggccatgccctgatctctgccttcagtgccttttctgtaaagtgaaggaaatgagtgtccgacggggaggaggttcctaaaagggagcagggtctggggagcccaggcctctggggttgggtgactgagaaggcagcccctgaatacagagcagagctgaaggtggggcagtaagtgctgctgggagaacaggcagcacaggctgagttggtgcagaagtgagtcaacatatgtgccatcgtataaaatgtactcatcggactgtagatgttagctattactattactgctattttatgttttatagacagggtctcactctgtcacccaggctggagtgcagtcacacaatcatagctcactgcaacctcagcctcctgggcttaagcgatctgcctcagcctcccaagtagctgggactacagatgtgtgccaccacgcctggctaaatttgtttaaaattttttttgtagagatggggtctccctatgttgcccaggctagtcttgaacttctgggctcaagcgaccctcctgccttggcctcccaaattgctgggattacaggcataagccactgtgctgggccatattactgctgtcatttatggccaaaagtttgctcaaacattttccagttaccagagccacatctcaagggtctgacactgggaaaacaccacgtgcggatcgggcacacgctgatgcttgccctgctcagggctatctagtgttccctgccagaacctatgcacgtgtggtgagagcttaaagcaatggatgcttcccccaacatgccagacactcctgaggagcctggcggctgctggccatgccccgtgtgcatgtaggcgatggggaagtgagtggaggagagcggaaccttgattctgctcatcaaactgcttaaccgctgaagcaaaagggggaacttttttcccgatcagcagaatgacatcgtgatggggaaagggctccccagatggctggtgagcagtgtgtgtctgtgaccccgtctgccccaccccctgaacacacctctgccggctgagggtgacacaaccctgttccctgtcgctctgttcccgcttatctctcccgccttttcggcgccaccaccttcttggaaatgagacagagcaaaggggagggggctcagaccaccgcctcccctggcaggccccataaaagcgactgtcactcggtcccagacaccagagcaagctcaagacccagcagtgggacagccagacagacggcacgatggcactgagctcccagatctgggccgcttgcctcctgctcctcctcctcctcgccagcctgaccagtggctctgttttcccacaacaggtgagagcccagtggcctgggtccttagcagggcagcagggatgggagagccaggcctcagcctagggcactggagacacccgagcactgagcagagctcaggacgtctcaggagtactggcagctgaacaggaaccaggacaggcacggtggctcatgcctgtaatcccagcactttgggaggttgaggcaggcagcccacttgaggtcagtttgagaccagcctggccaacatggtaaaaccccgtctctactaaaaatacaaaagttagccaggcttggtggcaggtgcctgtaatcccagctactcgggagactgaggcaggagaattgcttgaacccgcaaggtggaggttgcacagtgagctgagattgcaccactgcactccagcctggcaacagagcaagactccatctccaaaaaagaacagaaatcaatgaagcaccgagtgacagggactggaaggtcctaattccatgggtatttacggaacccctacgccgtgtggagtcttattctagacagtggggacgaggccatgaacaaggtagatgagagaggagatttctccatcctggtcagggaatttgttaaagactgatgaaaacatgaataaataattgtgtctagtacattctattcgtgaatctcataacagacagtggtagagtgaccgtgacccattcgccacacagtagagtcacttttttggtttgttttttagagacagggtcttcctctgttgctgaggctggagtgcagtggtgcagtcatagttcactgcagcctcaacctcctgtgctcaagcaatcctcccacctcagcgtcccaagtagctgggacagcaggcacatgccacgggttgggggaccacaggcatggtcaaggggctggcagtcaagcaagtgtttcatgagaaagtgacagttgaccttcgtcttggagggtgagagatggaggcagcaaagacctaaggagaggacaagccagcatagcccagggtcaggctgaacaagaggagatggtgggacttggggataaggctgaggggtgggcagtccctaagtcttgtgggcaaccatgcagacactgatttttccttggaataaagaggaagcccccataagcttttttttttttttctgagatagggtctcgctctgtcgttcaggctggtgtgcagtggcatcatctgggctcactgcaacctccgcctcccgggttcaagcaattctcctgcctcagcttcccgagcagctgggattacaggcggctgccaccacgcccggctaatttttgtttttttagtagagacagggtttcaccatgttg[133 bp omitted]tggccatgttttaaaaaacttaatctgccagtcaggcaccatggctcacacctgtaatcccagagttttgggaggccaaggtaggaagatcagttgagcccaggagttcaagaccagcttgggcaacacaaccagaccccacctctacaaaaaattaaaaaattagccgggtgtggtggcgtgcacctgctgtcccagctactcgggaagctgaggcgggagcatcgcttgagcacaggaggtcaaggctgcagggagctatgactgtgccactgcactctggcctgggcaacagaggaagactctgtctaaaaaacaaacaaaaaaagtgactctgctgtgtggcaaatggattgaggggcaagaatgcagggaggtgtgttaggaggctggcactggcatccaggcaggggaaggtgatatcccaaagaagagtagcagctgtggaaagaggaggaggcggatctgggaggtttttttttttaggaaaagccgcccatgggaaggtgagcagaagcaagaaagcaaggcccctcctaagagtccatttgagctctgggtttaaaccacttggagaggagcaggttgccgggagccagtctcagaggtccactgggccccctgccatcctctgcacccccttctgctttcacagacgggacaacttgcagagctgcaaccccaggacagagctggagccagggccagctggatggtgagcgcaacagtgatgcctttcctagccccctgctccctccccatgctaaggccggttccctgctcacattcccttccttcccacagcccatgttccagaggcgaaggaggcgagacacccacttccccatctgcattttctgctgcggctgctgtcatcgatcaaagtgtgggatgtgctgcaagacgtagaacctacctgccctgcccccgtcccctcccttccttatttattcctgctgccccagaacataggtcttggaataaaatggctggttcttttgttttccaaaccagagtgtctgttgtcctttctctctgccgagtgtctgtgctaagagcttgtcctgaccctgccttgcaagcaccagtgcttggtgggtcatgtggggctggtgtgtcctggaggttgccaggaaagttggtgaagaaaatttgtttctgttctcccccttcatgttgcaataataggggatgaaagttaatgtttcctctccttgagatcttcctaaaacagctgtagaaatcagtgcctgtaaggcaagcttgtccaacctggaggccacatgcagccctggatggctttgaatgcacccaacacaaatttgtagtttcttaaggcattatgagatttttccgcaatttttttttttctcatcagctgtcattagtgttagtgtgttttatgtgtggcccaagacaattcttccagtgtggcccagggaagccaaaacattggacactgctataaaggttctcaaagtaagatccagggactccttttgtagggctcctgaaggtggaaactactaagactttttttttcctttttttttccttttttttctttcttttttttttttttttgaggcagagtctctctgtgtcacccaggctggagggcagtggcatgatcttggctcactgcaacctccacctcccaggttcaagcgattcccctgcctcagcctcctgaatagctgggactacaggcacgtgccaccacacctggctaatttttgtatttttagtagaggtggggttttgccatgttgtccaggctggtctcgaactcctgacctcaagtgatccacccgtctcagtctcccaaagtgctgagattacaggtgtgagccaccacgcccggcctacaaagatgtttatttgcctttttcaccctggttctctcatgagtatacaatggagtttccaggaggctctgcgacacctgttggcatcatcaccagatggctaatggattgtgtgctggtgtatctcacgcttttaaatgtcccagtttctagcccggtgcagttgcaccatccctgctactcgggaggctgaggcaggaggataatttaagactgggagttccagaagaagacctggtgtcaaaaaaaaaaaaaatggggcaacgaaaatgagagcaatacagctttcaagaatgggaggggccaggggtggtgattcatgcctacagcactttgggtggctgaggcaggcagatcacttgaggtcaggagttcaagaccagcctggccaacatggtgaaacaccgtctctacaaaaattagccaggcatggtggcatgtgcctgtaatcccagctagtcaggaggctgagtcaggagaatcacttgaaccctggaggtggaggttacagtgagccaagacaacactgctgcactccagcctgggcgacggagtgagaccctgtctccagaaaaaaaaaaaaagaagaatgggcaggaactcagttccttgtggaggtgaactatattcctatatgtttcacgtgcaaagtgtgtccttcctgagagaatacaacttaagatgctcctgtgtaacaatcccccatacctcgctcatctgctatacctggatggcctctgaaggccatgggcctcacaccttttggtcttaggacccctttacattctgagaaattattgaggactccaaaaagctcttgataaagtgggctatatctctagttgcctgatgtattagaaactgaaactgggaaaatatttttactgtttatttatttatttttgagacagggtctcactctgtcgcccaggctggagtgcagtggcgcgatctcagctcactgcaaactccacctcccagtttcaagcggttctcctgccttggcctcctgagtagctggaactacaggcgcccgccaccatgcctggctaattttcatatttttagtagagacagggtttcaccgtgttggccaagctggtcttaaacgcctaacctcaagtgatccacccgcctcagccactcaaaatgctgtgattacaggtgggcctggcctgcccacatttgatagaaacagacataggggctgttatttcactgtcttcttagctcccaggaagcaacagctctcacttgatggtaaagggcattggtcattcggcctcaatgttgggtgtgggcagggagtgggaaggcccaggctgggcgggagagggctccaagacacggctgccacacccaaggcaggtaaacctgactagaacttctgattttgtcaagagaaggtgggaattcctatttttattagagatttcttgctttgacagtattggcaactgagcaaagcaatttgtcttttaacatcaacattctgtgagccaaacgaagcccagctgggcgccagatcagtctggggcaccatcaatgtctgccttcgctttggaatccacagaggcttgtcctctgggaggggaggtttcctgaatgaaaactgaagggatagggagaggggagttgtggtgagcttggcctcttattagctgtaacatcttgcatgcatcttcttcatatccggagctccacctcctcatctgtattttttattttatttttttagtctgggtcttgctccatagcccaggctgaagtgcagtggtgtgatcatggctcactgcagtcttgatctcccgggctcaagcgatcctcccacctctgcctcctgagtagctgggaccgcaggtgcctatcaccacgccccgctaaagttttgtattttgtgtagagacgtggatctggctgtgttgcccaggcgggtctcaaactcatggcttcaaatgatcctcccacttcagcctcccaaaatgctgggactacagttgtgagccaccatgcctggcctctccttacctttaaaagaacagaggcactgggcgtggtggctcacgctgtaatcccagcactttgggaggccaaggcgggtggatcacctgaggtcaggagtttgagaccagcctgaccaacatggtgaaaccccgtctctactgaaaatacaaaaattagccaggcgtgttggcgcacacctataatctcagctactctggaggctgaggcaggagaatcgcttgaacccaggaagcagaggttgcagtgaaccaagatcatgccactgcactccagcctgggtgacagaacaagactccatctcaaaaaaaaaaaaaaaaaacaaaaaaggaacagaagctaagtccatacaggacttagcttaactggctctagagctgctcaaccaagggaatgagtgtgaaattgctttggaaactgtccaatgcttcctcaatgtaaaggattcatattgacaggagagggtagaggcctccctcctggcaggtgggaaacctgaaatcaggaattacacttaatgacacggggtgctcttctctcctgagcaagcagttctctggggtggtcctagagagatgggagaacatgtaaagcagagatactcaaatttcagcgtgctcaaaatctcctggagggcctgcaaaaatgcagatgggtccaggctcagtggctcaagcctgtaatcccagcactttaggaagctgaggctggaggatcacttgaagccaggagttcgagaccagcctggccaacatggtgaaagcccgtctctactaaaaatacaaaaattagctgggtgtggtggtgcacacgtgtagtcccagctactcgggaggttgaggcacgagaattgcttgaacctgggaggcagaagctgaggtgagctgagaccttgccactgcactctagcctgggtgacagaatgagactctgtctcaaaaaaaattaaataaataaaaataaaatgcagatgaggctgggcgtggtggagcatgcctataatcccagtggtttacgaggctgagacgggaggattacttgaggccaggaattcaaggctgcagtgacctatgatggcaccactgcactgcagcctgggtgacacagtgagacgatgtctgtaaaacaaataaacaaataaactgcagatagctgggcctccagaatttctgattccacaggtgcaaggcggggcccttgaccttgcattttgagcaagctgcagtcctgtggaggactggttgtgaagctgacaccattgtctgagggcagcaaaggctcttggatggattgagcctcagctcccatctatgagagctttaagctttaagtgagagctccccatggccgagagcttcattctgaattcctgctgctaggaattcaaaactcacattgaagtcctaacgcctagtagctcagaatgtgaccttagttggaggcagggtcttcacagaggtaatcaagttaaaatgagacgggagaatcctaatccaatataactggtttcctaaatctgacagggtacagtgactcacacctgtaatcccagcagtttgggaggccaacacaggaggactgcttgagatcaggaattcaagaccagcctgggcaatatagtgagaccctgtctctagcaaaaaaaaaaaaaaaaaaaaaagtgccagtagtcccagttactattgagaggctgaagcaagagagtcgcttgaatctggagggtggaggtggcagtaaggtatgattgcaccactgcattccagcctaaatgacaaagcaatactatgtctcaaacataaataaataaataaataaataaataaataaataaataaacggcaaatctgggcaggggtgaatacagggggaagggaatgtgaagatgaagatgccatacagagaaaggcccggaacagatcctcacacccctcagaaggaaccaacactgccagcacttgatcttgttgatcttggaattcaagctcaattctggcagggttttttgtttgtttgtttgtttgtttgtttgagtcggagtcttgctctgttgcccagcctggagtgcagtggcgcaatctccgctcactgccagccccgcctcccgggttcacgccattctcctgcctcagcctcctgagtagctgggactacaggcgcctgccaccatgcccggctaattttttgtatttttagtagagacagggtttcaccgtgttagccatgatggtctcgatctcctgacctcgtgatctgcccgccttggcctcccaaagcactgggagtacaggtgtgagccaccgtgcatggcctcaattccggtttttaagccacccagtttgtgaaactttgttgtaacagccctggaaaactgatacacctgctctctcgtaaaagatcagctgatacggcagcaccggccactggatctgcgggtcagttgtccccttagacagggcacctgcccgccagtcacaggtcctgtcacccagccccttcctctcatgggctccagccgcctcgctcccacaggtctcctggagacccgagttgctgatgtcagcgactattgcgagtgctcctgtgggacactgtcctctccccagcaacagccttcagttcacacccagggaggagatggagccccacactgcaccagcacacgactccagctccaactaggtgggtgttgatgctgaaggctgtgacatgcaaataccccccaggatctccttgtcaccccgaccaccaccaccaaagcccaggcaccaggcccctctcttctccaggacccaggcattcaagccccgcccgactctcaatggtcctttgtcccggactgggaaaggcacgggcagagtctgacatcatgaagcctggggtgggggtgggactccccctccccctccaactcccccccagccccacaacgcttctctccctggtctgagggatttccccgcccctcaccccctgggttctcccttgagagcgaggaccccccctccccactgctctggcctgaaggaggacaggagatgtcccagtgaggctgaacagctcatggtgaaatcactgctgcactttgtcacgccacctccagctgccccgagcccccacccaccttgcaaaagtcatgaccaaggggtggaatctgcactcagagggtccttgcccaacttggtcagcacagtcctatgtgcaccaagcactgccccggggacagaagggtgcacatgacagacagagaggcagataggtttctggtgagcccctgcctctgagagctcctgggttagtgggaggcagaggcgggcagacctagggtgcacacgggccagcctgccaaggctacagaaggaaaggacagcattgcaatggaggggcctggctgatgggcgaagatgggaaagcttcccagggaagcggcacccaggctgctgagcctacaggatgggtgaacggcagccagtgccagagtggggagtgctatggggtggggactgctttccaggaagaatgagcagcaggtgcacaggccttgagtctgaaggtgccctggggctctggggaacacattcaaccacccacactgtttattaagctcaactgcctgccaggagcttgtctacgagcaaggatggattgagaatatccaagacgaagcttctggcctggtggaggtcacgttctcatgaaaggagttggtgaacacggaaggtcatttcagatggcaagaggaggtgacactgacgttgagggtggaaaggacctgtctcctcctgctgcccacctaatgttgccaccaagattccctgaggacaatgcctctgtccctcagcctgggacttccaaagagattagactgcccccccacccccgggacccagaatcagggtgtacagggatggaagatggggagagagcaaggcagccactcccgacccctccaggaaagagctaggagaacccaggcgtcaggctgcccagtccgagccccgtggtgacaagggcccctttgtgcccccctcccccgggggtagggaggagctgggccctggaggcaggcggcccctggcacccagggggaggggaggggctggcaagtgggggcctagaccctggaaggcaggggactgcgagctgggctggcggagcagaggtgcagaagcaactgagtccaagtgagtatggtggcagggaggccagggcaaggggagcagggcaccggggcagtggcacccagacgtgagcagggtcaggtgctctgggtgagggagcatcgctgtgcaccgctactgatttaggatgcaggagtgtgtggcttggggctgctttggggatgggctcggaccatcgctggggcagcgatggggctctgggaagaaaccacagagagaaaaaacaaagggccccccctcagcaccccttgtgggtgaagattttgcaggagaggtttccttggggttcccgagtgcggggcagatggggtggaggaggtctgcatctggccgaagaatggaaggatgtccaggtgatcagacacctgcaggctgcaatctgggaggtggatgggggcagtgggctgttagtgactgcattctagcacctgggcacatagcaggtgtgtgtgtgtgtgtgtgtgcgtgtgcgtgcacacacatggctgcccatgcaccttcctctgtaagcctcagtcgacttttcttcattaatccccactaaggacactttttatttttcgttacttttttttttttaagagacgggactctcactatattgcccaggctggtctcaaacttctgggcacaagagattctcccaacttggccttccaaagtgctgggtttacaggcgtgagccactgcgcccggccccaactacagaaactttttagatgcatttgtcctcatcccatccttcccttggcattttaatccaacagatctgctgtacatatgtttatggactgtggccacacacactgtaatagctgaggttgatttggcccccatcccgagaacttgttttccccgctgttaagagtgcatggtctacctgcttgtttcatgtctgcccgggcacgtgctcatcctcatctgcatctctctcctgtaccttcctgtcacaggtgcaagggcagcgtcggccaggtgtccatcggcgcgtgtctgagtggacgcgtctatagccatcctcagtgtgtgtgtgcagttccttgcatctttgttagcctggcatgcatgctgggctgtgtgtgtgtgtgtgtgtgtgtgctgaatgccagggctgtgtctgtccaggtgtgtgtggacagcagcagaggcattgcatgcacgccttgggaactatgtgagtgccagcccatccctgtgggcacaggggtccctgtgcctgtctgtgtgttcagggtcctgtctgggtgtctgtatgagtctccgctgcgtgtgcctgccccttctggctggggctacatctgtcacatttcatccccgcgattggatgtgtctgtgcatgtgtctctgtccgtgggaagagggcggtgaaggctgggaaaagcaattgcttggaaaccctggctgcaaccccaaggcaacccatggagcagcagggtgccaggggctcgctagcccccaccctgggccttcctggccctgctcaaaggccagccaggagtgcctgacccctttcttactccccacttaccctgaaagccccccgcaggctaaaacaccctctccccgagggaacaggactcttttgtaccggggaccagcttctggtgagggtgcggacaccaggggccgtctgtggggtgggagagggcggcaggaattcacgcggcatgtcgggaatgctgatactgtgaaacccagtcattgatggctctgggtccctgcccgccacccccaggccccggccgtgggacatctgctccctcactccactcgccacacccctcagtctcacccccgtaccccgatgcggtcgttcccccttccctccccacagttctctgacaccccagcttggagggagttgttgccagagagtggcttcgaggctgtgtgggagggtcccaggcacaatgggagggccacatgggcagcctgacaacaggtcacaacccatgcaggagatactgaagcgggggtgggttgggtgcctcaatcccgcccccttgcacctgagtgactcttgttgcatgcaggttgtctggcggcttcaggtggacccagaagacgtccccaactcagggagattcaggtgaggggcagggtaccaactctcttcccttgcttcagctttgcaatgctggccctgccttggctctctggttcttactttctggagatctccaggggcatcacggtgacaaagataatgatcagcacatcatcactgcatagagacaggacatgcagcaaagactgcagaccaactgtgtggccttgggcgagtcacttaacctctctggacctcagctataaaatgaggataatgcatcttcctcaaagagatccaatgagttaagacagcagaataagcagtgagggctggcacatggccaatgccatagaagggtttataattataagtaatagcagcaggctgggtgaggtggctcatgcctgtaatcccaacactttgggaggctgaggcaggaggatcgcttgagccaaggagttcaagaccagtctgggcaacacagaacatggcaagactcccatctctaaaaaaaataataataataaccaaataaataaactaaaataaaattagccaggcatggtggtgtgtacctgaggtcccagttactctgaaggatcgcttaagcctggcagattgaagctgcagttgagtgagccacgattgcaccactgcattccaggctgggtgacagggctgagaccccatctcaaaaagtaaaaagttaaaaaatatcagcagaccaggcatggtgatttacacctgtaatcctttgggaagccaaggcaggaatattgctggaggccaggagttgaagaccagcctgggcaacatagtaagaccccacctccacaaccatttccacaaaaaagaagaaaaattaactgggtgtggggtggcgcataccagaagctgagacaagaggataacacgagctcaggattttgaggctatagtgagctgttattgtgtcactgcattccagcccgggcaatgaaacaagaccctgtctcagaaaaataagtaaataaatgcataaataaataataatagcagcagcagctaacatatgaatgggccccttcctgaagcccagatggaacaccccctttcacttcccccagcctttaaccctctcctctccctttccagcgatcactcactcgctgtacagaatgatattcctcacggcactgcctctgttctggattatgatttcaggtaacggctgacaggtgctggggacctaaaggctttggcccctgagcaggttggaggtgggtccccgcagccccccggcatgtggttggggatgggagccggagggggtgatcgggtaggacgtgtccctgagcctcagctctcctgcttgcccgcagcctcccgagggggtcactggggtgcctggatgccctcgtccatctcggccttcgaaggcacgtgcgtctccatcccctgccgctttgacttcccggatgagctgcggcccgctgtggtgcatggtgtctggtacttcaatagcccctaccccaagaactaccccccggtggtcttcaagtcgcgcacccaagtagtccacgagagcttccagggccgcagccgcctcctgggggacctgggcctgcgaaactgcaccctcctgctcagcaacgtcagccccgagctgggcgggaagtactacttccgtggggacctgggcggctacaaccagtacaccttctcagagcacagcgtcctggatatcgtcagtgagtccccagcggttgtgcaggcaccgggagctggggcagcggggcgggaaggagtgtggccggaaggcctccccgcaccttccccagcaggcctggatggcagatctgggaggtgctgatttggctgggggtgcaaacctcaaggcccacgcagaccatgcagatgacagacatgaacaaagcagggccccaaaatagtcttgctgccctcagggggaaacaggtgctgctactcttttggaaacacctggagaaaggcagtggggccagggggtaggggcaaggctgctgggcccccactttagcgtggtgatcttgggcaagtgacttaacttccttgggccttggttttcttttccgtaaaatggggataagaacagcacttaaggcaatgagtgaaaagccatcagatgcccagagcagcacctggcacgtggcccccagctctggccaacagaaagcagggcggtggctgtcaggtgttctgaattttcaagataaaccagaattttggattctttggtgtaatctcctaattcttaaattttggttgctgattcagatttctttttttaaaatcctttaagccaaatagaatacagctatggccagacatggcaatcagaatagggcacactgcctgatttcagggatccccctgcctcatttctgagtggcgctgctgcttggagtcctcagcgctgagtccctatgagagagccgggttcaccctggtgcagaaagagactgcacaggtgcagtacacacacacaccactctacagaaatcacacactacacactgcacactctacctacacactacccacacaccacacactacacatacatcacacactacacaaaccacacaccacacactgctcctgctacctacacactgcccacacaccaaacatacacatcacaccaaacacaccacacacacacactacacaaaccacacaccacacactgcatacactacacacacacacactgcttggcgctgaggactccaagcagcagcgccactcagaaatgaggcagggggatccctgaaatcaggcagtgtgccctattctgattgccatgtctggccatagctgtattctatttggcttaaaggattttaaaaccacacaccacacacacaccacaccaaacacacaccacacacacacaccacattacaaaaactcaccacacactacacacacaccacacacaccacaccaagcacacaccacacacatcacacactacacaaaccacacaccacacacttcatacactacacacactacccacacaccacacacacaccacaccaaacacacacaccacacacacaccacactacaaaaaccacacaccacacactgcatacgctacacacacactacacacacaccacacaaacaccacaccaaacacacaccacacatccaccacgctacaaaaactacacaccacacactgcacatgccacacacacactacccacacaccacaccaaacacacaccacacacaccacacacaccacacactacataaaccacacatcacacactgcacatactacccacgtaccacacacacaccacacacctcataaactacacaccacacactgcacacactacccacacaccacacacactacacacactacacacaccacacacatacaccacacactgcacatgctacccacacaccaaacacacactacacactacacactgcacaaaccacacacacactacaccctatatacactgtacacatacatgcgccacccccacatcacaacacaaaccacacaccccacacacaacaaacatgcacaacacacgctacacaaaccacacaccacacacacaacacaccaaacacacaccacacacacataccacactacaaaaaccacacatcacacactgcacatgctacacacacacaccacaccaaacacacaccacacactacacaaaccacacaccacacactgcacatactacccacgcaccacacacacaccacacaccacataaactacacacacagtgcacacactacccacatgccacacactacacacaccacacactacacacaccacatacatacaccacacactgcacatgctacccacacatcaaacacacactacacactgcacaaaccacgcacacactacaccctatacacactacacatacatgcactacccacacatcacaacacaaaccacacactccacacacaacaaacatgcacaacacacactacaaaaaccacacactgcacacacaccacacagtacccaaaccacacgccacacaccacacactctacctacacactacccacacaccaaatacacaccacacaccaaacacacaccacacaaaccagacaccatgcacacaccacacacacaaaccacacactatacccaccacacactgcacacacacaccacatactacagaaaccacacaacacacactgcagacactacctctacaccaaacacacaccatgcgctacacacaaattacatgctacacaaaccacacacactacaccctacacaccctgcacacatacatgcactacccacacaccacacacataccacacactacacacagcacacacacaccacacatgatacaaaccacacaccgcatacacaccacatactacactcacaccacacaaaccacaccacacacacaccacacaccacacacaccacgtactacgcaaaccacataccacacacgacccaaactacacaacaccccacacacactgcacacatacatgtactacccacacatcacacacacaccacacatgacacagaccacacaccacatacaccacgctctacacccacaccacacaaaccacacatcacacacacaacacacactgcacacataccatacacaaaaaccacacactacacacatacatcacaaacacaccacatactacacaaaccacacacatcacactacacacatgcaccacacacccacaccacacacacacacacacacatacctacacacacacacactcacatgcccggcggagggtaaaccaagcaggcatgggagaggagagccgcttgggaagtgatgaggtgtggggagcccacgctgacgccagagccacagggtttgtagccagtgttacctggtgccagctgcagcctcagtttcttcatctgcaaaatgagcaaaattacagtcctcaccctctcgctttgcgggagggactggcaagttaaacgccgtcaagtgctctggccacgacactgtgattttcattacgatggcgctctggtggctccgtggagggctccggggtgaccaagaggaggaagggtaaagggaattctgaatctggaggcagggagcggaggcgataccgttgaggagtaccattgccagcaatggaggtggacaaggaggagggtgggtggggtgggaccgggaccgtagcccagtgctgctttctcagccctccctttccccgcctcgtatagacacccccaacatcgtggtgcccccagaggtggtggcaggcacggaggtggaggtcagctgcatggtgccggacaactgcccagagctgcgccctgagctgagctggctgggccacgaggggctgggggagcccgctgtgctgggccggctgcgggaggacgagggcacctgggtgcaggtgtcactgctgcacttcgtgcccacgagggaggccaacggccacaggctgggctgccaggcctccttccccaacaccaccctgcagttcgagggctacgccagcatggacgtcaagtgtgagcctgggtgcgggcggggcggggtggggcggggtggggcggggtccggggagggggtggacctggggatgcggccggaggcggggccgggccgtgatgggggcggggccatgcccagggccaggcagggattggggggttgggtgggacgggggcggaaccaggcagtcctggggcggggccaaggctgagggcggggccggacagtgttgggggcggggccgggctgggagagggcactgggccggttccccagcacctgctcactaacctcgctgtgtcgcgggccttagaccccccggtgattgtggagatgaactcctcggtggaggccatcgagggctcccacgtgagcctgctctgtggggctgacagcaaccccccgccgctgctgacctggatgcgggacgggacagtcctccgggaggcggtggccgagagcctgctcctggagctggaggaggtgacccccgccgaagacggcgtctatgcctgcctggccgagaatgcctatggccaggacaaccgcaccgtggggctcagtgtcatgtgtgagtggcccactctgtgcgtccacacgcccacctgcagccgagagataaagggaaaggggcctcatccagggcgagcatgggctgggtcccgaggggaccggccataaacagtcgaggccaaggtagacaggggggttgcaagtcaaggtgtaccttcattctttccacaagaatctggggaacacctgctctgcctcatcctccttccaggacaagacccaggcctgcctcctagggaagcctgttaactgcagcttcctgggggcagttcctggttgttctgggacttgatgtgggtctggtcccaggaatctgcgttttactttataaaatttttttggagacaaggccttgctctgttgcccagtctggaatgcagtggcaccatgatagcaccacttgccctcaaactcctgggctcaagcaagcctactaccccagcctcctgagcagctgggcctacaggtgtgcaccaccacactccaggctaattttcagattttttttgtaaaggtgggattttgctatgttgcccaggctggtatcaaactcttgggctcaagcaagcctcccacctcagcctgctgcgctgctgggcccacaggcaggtgccaccacacccagccaatttttctatttttttatagagacagagaatcgatatgttccctgggctagtcttaaacttctgggctcaagtgatcctcccgcctcagcctcccaaagtgctgggattagaggcatgagccaccgtgcctgtccaggaatctgcatttttaaatgaattccattgtagttctaatgagagggttgaggggacttcaggcctcatccagccccttgtatgcacatttatattactgggccagcaagaagggagctggtcagaagaggattcttagctgagaaccaaagagataccattcattcattcacaaatgtgtactgaggcaaagtgcccagcactggggatattaataatgacagccgcagccaacatttactccacagctcttgagtgctttttttttttttttttttttgagacagagtctggctctgtcgccaggctggaaggcaatggagcaatcttggctcactgcaacctcccacttccctgttcaagcaattctcctgcctcagcctcccgagtagctagaattataggcgcacaccaccacacctggctaatttttgtatttgtagtagagacagggtttcacca[137 bp omitted]tggtcaggctgctctcgatctcctgacctcaggtgacctgcctacctcagcctcccaaagtgctgggattacaggtgtgagccaccacgctcggactcctgcatgcttttgacatgcaatcttccccccggcattccccacggctggctctgcccacctcctaggctcgctgaagccttcccccatcatcctatcccaaactgtaactaccctgattttccataccctcagcccctttatttttctctacacacttcttcccatcttacaaattacatattttatttaattacatcggctgtttccacatgggccttgttcaagctagagcaatgcctgtcactcagcaggttctcagtgaatgttggatgatcacccctatgaggttggaactattatgaagcccattttccagatgagaaaaatgaggcccagagaggttaagatgtgggtccacacacaactggacaggggtagagtagggatctgaagacaagcatgctggctaccaagctgctgttcttggaaatgagatagccaggactggggtcacctgagccttcctgaaccggtgtgctaggtttggggtgggatctggggtcatatctggggatggtagttggctggcagaagaagcacctcctgggttctgaccatcagtcccgtcctaccccgcagatgcaccctggaagccaacagtgaacgggacaatggtggccgtagagggggagacggtctctatcttgtgctccacacagagcaacccggaccctattctcaccatcttcaaggagaagcagatcctgtccacggtcatctacgagagcgagctgcagctggagctgccggccgtgtcacccgaggatgatggagagtactggtgtgtggctgagaaccagtatggccagagggccaccgccttcaacctgtctgtggagtgtgagtaccttccgctcccctatgctggggatggacggttccgtgggggacaccagggttactgtgggtgcccacgcatcccaatcagtattggctttgcctgtcctccgcagagacaaggaagggagggcagggaagctgaattcacagcaggaaaataaaatcccatctgagaatattgtgttcccacatccgggagtgggcttttttttttttttttttttttgagacagagtattgagtcttgctctgtcacctaggctggagtgcagtggcaggatctcggctcactgcaattgctgcctcctgggttcaagcaattctcctgccccagcctcctgagtagctgggattacaggcgctcgccaccacacctggcaaatttttgtatttttagtagagacggggtttcgccatgttggcctggcttgtctcaaacccctgacttcagatgatctgcctgcctcagtctcccaaagtcctaggattacaggcgtgagccaccacgcgcagcctggggtgggcttttgaccagtgaaatttctggatcctgtggccactgcccctctgcactaaccgaaacaatgaccatgatctctaacctgtgtagagtgtcgctatgtaccaggcactgttggaagcgctgtacagcaacccactcatttaatcctcatgacatcttcatgagggaggttctattactgtttccctgtttacggagaaggaaactgagacccagagaggttatgccacttgcctaagttcccacagccaggaaatggcagaatttgaggtttgaatccaggcagtctggttccattcttcttccctgcccaaggctgacctcatcctatgttatgacagcagaatacattgatggggtaattgctatacacaaaaggctgtgcggctctgtgagaggtggaggatagggctgagaagacaccacgcttatgaacaggtacagaatagctggagagatgacacagatgcacataaaaagctactgtcttggaaatgaaactcaccattgcaccgctggccagcgcctctcatctcctcactatggactgtgccaccatctcccaccacccctacccccacagccatcactccaggttgtagcagccaagtcacagttttgactccccttccttaagcaattccctctggaatatcgccttcctgtttccatttcccctgcttcctcccaagttcctgttggcttctagcactcctccccaaatttcacctctctggtcttcacgatgcccacaatggcccccaccacacaagtttgccagaaggttcgatgacattcaacatgcaaagaattcaaagcagtgtctgctacacagtacatgctctgtgctgtgtacatggcgacaatcagtacatggcagatacaggttagtcctcgggggcaacctctcgtggcaaagccgtccctctcctgctgacctataatcttcaggcactttccctcctggttctgttccctagcggggctgatgtgatcctggcgcggggctgcgtggtcccctgctccctccaactgtgcgtgctatcctgggccagcttccccctctggttgtcccctgatccctgttacaccccacaccagtgattcttcagtttaagagtcagagagaggagccgatgggagtacttgaacaagcctgcagcaccaactcacatacattttccggtggggtgcagatctctcctttatagtaagagcagcaggcagcaaatgcgcgttaggggcctgccctgggccagaccttgaatcctctacagctgttttctggttcagttcttatttttattattattattattttttttttgagactgagtctcgctctgtcacccaggccagagtgcagtggcacgatcttggctcactgcaacctctgcctcccagattcaagcgattctcctgcctcagcctcccaactagctgggattacaggcatgcgtcaccatgcccagctaattttttatttttagtagagacggggtttctccatgttgcccaggctgttctccaactcctagtctcaagtgatccacccgcctcggcctcccaaagtgctgggattacaggtgtgagccaccatgcccagcctatctggctcattttcaattctagggtcaccctgtgaaacaggggtgtgttataattatcccctttaccaaggagaaaactcaagggcggaattccctgaggccaggcagctataaaagtgggtccgagcccgataattccagactcctgtctgccccagctgttaaacctctggctgcctcacctccctcacagctcttagcactctaggactcaatccggcttctcttgaaaacgaacacgcaggcagatgtggagtgtgcaggcctcacctgctagacttgaggggagcagtggccctgtcccctgccccacctgccagctccctactcttcacccaggcctgtgtcaaagtgcttgcccttggagagtgcgaccctcaggccccctccctctccacacagtcaatgttccctggcaccaggtctccaatgttcactgacagtggtggtgacccttgagcagggccttctgtcttacctgccaaccccagagccctgaacggcacggggcatgcaggaagtgtgcaaccttaccgagtgcctgagatgtctagggaactagcttgagtacgttgtacgcattgacctattttgttcttacaaccatgtgattgaggggagggtaccattcttcaacccagtttaatacaaggaaacagaagtttgactggcatccagtcccaacagggctgaacagacctgggctagaatcccagctctgtccccatcctcctgcctgagctcaggcgagtgacttcagctttgcaacccttagcaagggttcataacagtatcttaccacaaagatggctgtgagaactaagagaattaggctgggcgtggtggcccacacctgtagtcccagcactttgggaggctgagacagttggatcacttgaggccaggagttcgagaccagcctgaccaacctgacaaaaccccatctctactaaaaatacaaaaattagccaggcgtgatggcgcacacctgcagttccagctactcaggaggctgaggcaggagaatcgcttgagcccggggggtggaggttgcagtgagctgagatggagccagtgcactccagcctggatgacagagcaagactgtcccagccccccactccagcctggatgacagagcaagactgtcccacccccccactccagcctggatgacagagcaagactgtcccatccccccactccagcctggatgacagagcaagactgtcccacccccctactccagcctggatgacagagcaagactgtcccatccccccactccagcctggatgacagagcaagactgtcccacccccacactccagcctggatgacagagcaagactgtcccacccccccactcccccacaaaaaagaagaactaagagaacaatactgagtgttcatagtgctacatactctgtggatattggatgtcatcatctttctcactgatttttcctttggactccaggttaaatatttgttgtgtgttttgctgctgaggttttgctcatgtgacctctctgcgggaatggttctgtctatccacccatgagtacttgggtgggatgttacgtatttttaattttaattttttatttttttgagacagggtcttgctctgttgcccaggctggaatgcagtggtttgatcatcgctcactgcagcctcaacctcctgggctcaactgattctcacacttcagcctcctgagtagctgggactacaggcacacatcaccatgcccagttaatgttttaattttttgtagagatggggtcttgctctgttgcccaggctggtctcaaactcctgggctcaagtgatcctcctgccttggcctcccaaagtgctggaatgacaggtgtgagccactgcacccggctgggatgttaagtgtttacaacacacttgcgcgcctatcttcggagtcccgtagccccttgtgagttactgactgtaaccccctggtttgcacagatgagaactccatcctagaggcccaggagcctgagtggcctcacccagccagtagatggcagagctgggattcaagccaaatccatcccaccacaaactcctcattctttgtacctttgtcttacaggtttgtctagagtcccataacagtttccgcagcttcacaggttgtctgaaaagatactaagcacgtgcaccggcagggtgtcggcgttccgccgacatccaggtcgaacactttgtcaccagagcaccagtggggctgtcttgagtggaagtgctttgaaaaagttttatgtctgtcggttcaggttcgctgttattaatgtactccgtggcgtgttagctggttaacgctatagcaagcatattgcagctctgcccgaacaggactttttattcagtagacttagagatgtttgcacagaggttcccattcctgccgtgaatccgtgtgcccgtgtgactcccaggtccaccaccgttaccggcacattctttttgctagcaattgaaaataggtggggtaggtgagccaagggtctcttgcctgtgtgtaagtgggttttggtgagaactcactgagaaccagtgctcagtctagagcaagccaaggagggtgctggactctcaggccaagaaagagaacacagtttaaaaagcagcattctgtgctgtaatacaattgcgtattttggtacaaaaattagccaggcatggtggcacgcacgtgtagtcccagctactcaagaggctgaggcaggacaatcacttgaacctgggaggcagaggttgcagtgagcagagatcgtgccactgcactccagcctgggcgacagagagactccgtctcaaaaatcatagtaataacaataataataataataatttcctgttttggaaaatgaaagaaaaaacctaccagtactatttttgtaatccagtggcagcaaagcaaagctcaaccaagtgactttgggtggagggtggtgtttggtgctagtggcaggagggaatctcatgggtgaggaagggccggggttcaaggcggctttaggggaggaagtggggggcatctgcagcgcagactgaaaggaaggagcacagcctggaagccagaaaggaggggatagtctaagcctgtgtgagccccaagggtctggggaggccgggggctgggagagttccatggttcctcccttctacgtgtggggcccagagtggagaaggagcaagcccctgtcttgatggaaacaggaggccccttatgtaagtgtgtgatgcagggagggtgagtgctggggaggagaactgagtgaggcagggagtgaatgatacgtggagcgaggtgcagcttccctgggtggtcagagaaggagacgccgcatgggtagaggccagtttggagcgagggagggcgttccacaggcaactgatggaagtgttccaagttgagggagaaacgtacagaccctggagtgggagaaagctccacgattttcagacacagcaaggaaccggtgtggctggaaaggactaagccagggggagagaaggagagagtgtgtggtcaggcagggcctgaggggccttgtagatgaaagactttgtattttgggctgggcacagtggcttgcgccttataatcccagcactttgggaggccaaggcaggaggattgcttgagctcaggagttcaagaccagcatggggaacatagcaagaccctgtctctacaaaaacaaacaaaaaccctccagtaactatcatgagtatgacagatttaccgtcctctgcaattctgaacataaagctttaaaatcaaaaggctttttgcaaatttggcaccaccctgatttgacagcaaaatctcgcctaaagaacacaaggctgtttgtaatctatactgatttcatttagggtgaatattcgtactttttgctgtatacattacattgaactatgtgaaat[131 bp omitted]ctgcacttcagcctgggcgacagggccagaccctgtctctaaacgataaaaaataaaggatttgtattttaggtgaaccacggagcaacagaaggagggttttgagcagagagtgccatgatctgatttatgtattacaaggtgaatgaggttagagagagtgtaagagccagggcccaggagaaacggcccgtccctgtgacatagtgctctgtccaggctgaagctgaggctagagtcgcctcaaaagtggcaccagaagaattgccccaagagagcaccccaaaccaccccgaaatgaggccacttgggattccaaagagagaggcactaaaccaccaggtgatcatcagtccaaagcatttgggaggggaacttgcacagtgctacggcgagagaaagggagggtctacccagacacgtccgtgagggtcagggtatgggtttacatgagggtttaaggaatttggcccagggctggggctggtttctttcattctttcatttttgttgttgttgttgtttggggtttttttgagacagcgtctcattctgtaacctctcgtactcctgacctcaagtgatccactcactcttcggcctcgcaaagtgctaggattacagcagtgagccaccatgcccggcctctttcagtgttttgagcaacaacctaaacacctttatcagtgcctgggaatgttcaaggccccaggcgtgggttagtgaagcttgcagtgaaaacaggcagccggcggggtcgtagtgaggtcaaggcgctctcagtcaggacagagaaaaaaggaggggaaattggagggccctacaggaagctaccgcccccatccttggccacactggccttgccttgagccaaggagtctccggggccgggcctcgcgttggctccgggccaccctcagacctgattttgcccctgcagtcgcccctgtgctcctcctggagtcccactgcgcggcagcccgagacacggtgcagtgcctgtgcgtggtgaagtccaacccggagccgtccgtggcctttgagctgccatcgcgcaatgtgaccgtgaacgagagcgagcgggagttcgtgtactcggagcgcagcggcctcgtgctcaccagcatcctcacgctgcgggggcaggcccaggccccgccccgcgtcatctgcaccgcgaggaacctctatggcgccaagagcctggagctgcccttccagggagcccgtgagtggcgtggacttggggtgggagccacaggagggagcgggcacgtcttagatccaagctcccaaggctgaccaacagccacagagcatgggctatgcagattgacagaaaggtcaaattctccctttccggttggagaggagaagccgccctgagtttgccccgagtttgctaggacctttgaggcatgagcccctccccagggccctctagcatgaaagggattgccctggcacgaggaggctccgtgccaatcagtcagtgcaaggatgccccggctgtgtgactacattgactgtcatcccagcatgtctccaaagttctcaggtgtcgtcaccaccacccatagccctaagggcgcctgggtcttttctgtcctcagatcgactgatgtgggccaagatcgggcctgtgggcgccgtggtcgcctttgccatcctgattgccatcgtctgctacattacccagacacgcaggaagtgagtgccagctggggctgatctggggatgggagtctccaaaaaggggacctggtgggagatggaggcccagagtgggtgggggaaggcagcaccataagtgtagagaaggcagattctgttctgggaatgttcagctggacagaggagagagggttcctgttaattccagcccctgctggtcaggggcacaccagggcctgggctgagccctttacacacatcatttgagacctgtttgcccacattctattttgacagcctccctatctctaggaactctcccctacacactccagtgtggtggggaaagcccaggtaccccactgcagccacagcagcaggtccacttgacgccagaagccccaaagattacacacatctggggcaaaaaaaaaataggccttggccgggcgcgttgactcacgcctgttatcccgcactttaggaggccaaggaggaaggattgcttgaggccaggaatctgacaccagcctgggcaacatagcaagaccacatctctaaaaaaaatttttttttaattagccaggcatggtggcacacactgtagtcccagctacttgggaggctgaggtggaacgattcttgagctcaggaattagaggccagcctgggcaacatagggagaccccatctacaaaaaaacaaaaaaattagctactagtggcacgtgcctgttgtcccagctactcgggaggctgaggagggaagatcgcttgagcctgggaggttgaggctgtagtgagctatgatttcaccactgtactccagcctaggtgacaaagagagaccctgtctctaaaaacaaacaaacagacagacagacagacagaaagcctctccagccccaaaccatacccacctggcccaactcagctgcagccgtgtttctttcttgtggcacacacacatcagctgtcctgagaaataaattaacccctctgctccacatcctggtggcaagaggggcagaaagacccagagcctatgaggggaacctggagaatccaggtgggggtcctgaaaaacggcagagctcaggggccaggtggctcgtccccagccgggcaggggccacagaggtgggaaggatgggctgtgtgggtaggagaggctggtggttctgaaagggctgcttgccacatcttagagatgggtgggagaactctgaggtcccctgagccaaactcctaaaacacgtgggggtgcagaaagggagggcagagagaggtctgacgagtcctgccctgcagaaagaacgtgacagagagccccagcttctcggcaggggacaaccctcccgtcctgttcagcagcgacttccgcatctctggggcaccagagaagtacgaggtaaggaccaggctccaggctggcctgggaacctggatgccagggacactgaaggcctgggaaaggcctgtgaggccaaggggcaggggagtgggagcggcctctcacaggaggagaggaaggacattccagggctgggttggacctggaggctggggaggaggtgcccaggccgaagctgtgtagggggcgatgggacgtggggcctaagggccccctcccctccctgcctgtgtctgtgactgcatttccttctccaatagtccaaagaggtttctaccctggaatctcactgagtgccccaggaggtaggttccgggggcctcagtgtgccctcctctgggccctccttgggccctggggttggcgtgcatgtccgtgtgtccctgtcaggcgtcaaggtggtctctggtgatgtccgggcctgcccggcagtgctggccttgtctagtctgtcctgttgcagctcccttctgtctgtggccaccgtcctgtgtgtccaaattcctgtggctagggggtggagggaggggtgggaagcgtggggggaacccacatgtcacctgcaggacctcccagattgagggcggacccatgcaggacccatgggggggcacgtaccaaaccaggtatttccaggaatttggaaagatggggtcctgactaggtggttttcacccaaaaaggtattaggggttacattgtgtgccctcaaaactcctatgttgaaagcttcctggacgggggcagtggctcacacctgtaatcccacaactttgggaatctgaggcggatggatcacttgaggtcaggagtttgagaccagcctggccaacatggtgaaaccctgtctctactaaaaatacaaaaaattagccaggcgtgttggcaggtgcctgtaatcccagctacttgggaggctgaggcaggagaattgctggaacccaggaagtggaggctgcagtgagcaaagatcgagccattgcaatccagcctgggtctcaaagaaaaagaagaagaagaagcagcttcctggagaaactgaatttgtaggcaaatttcaagttcagcaatgattaacactggcagaagctccagagtgggacctggtgaccgcagggctcgctgggcctgcggtccttgagaaaggaggttctcgcagggatttatttgggactgaactcaggagctctgagggtgcaaacgctctgtcctctgcattgggaaaaggcagggagcaggaccctgctaatgggcggtttcccctcttagagcgagaggcgcctgggatctgagaggaggctgctgggccttcggggtgagcccccagagctggacctgagctattctcactcggacctggggaaacggcccaccaaggacagctacacgctgacggaggagctagctgagtatgctgaaatccgggtcaagtgaaggagctgggggcagcctgcgtggctgacccccctcaggaccctcgctggcccccactggctgtgggctcccttcctcccaaaagtatcgggggctggggcaggaggggagtgaggcaggtgacagtgaggtcctgggggcctgacctccccctccttcccagctgcccctccctgccagcacccccacgccctcattacggctcctctctaacctcctttaccctcatctgtctggaggggagctctgtctgtccgtgttatttattgctacttcctgcctggtctcctgcccccacacctggccctggggcctgtacaaaagggacatgaaataaatgccccaaagccaaatgccagtctagatcctgatgctttctgacccgcctttgggcagcctgccatcccaccgtctacagaacgatgacagaatttctccttgccctcggctgagcctggtatgcaggcaagggcccagggattttagccttgaacccagggccagtggccactaagttgctcccactctgagctggtagctgcgagctgggtctggtttgacttatggatgatttcacataaaaatcctcatgctggtttttgccgcagtcagatcagctgacagcaccaggcttgcacttgtacgtggacatgacttgctgaaagggagggtcctgtgcactggccgcagtccccaccactccctattgtcccacacctggccggcttcctgcactgagattacctcctggtccctgcagcttggagtgcgagccacagatctaggtctcaccagcccgtgttggtttcaccaccatctctcacattcatgctgcaatttgcagcgtcagcctttatacatcactacattcagttccagaaacattaattaagcaccagctgtatactgagccctttctagaggctcaggctgtcctgagaagggtctcctaggacagctctgtgacgatgagaacactgagacttagagaagttaggtgattttcccagggtcccagagctcggaaacggtgtgtccaggccatggggttgatgcttctgattcaaatgcactctttcttttcttttcccttcctccctctctctctctctctctcttttttttgatggagtctgtctctgtcacccaggctggagtgcagtggtgcaatctcagctcactgcaacctccgcctcctgggttcaagtgattctcctgcctcagcctcccaagtagctgagatcacaggcactcgccaccacgcccggctaatttttgtatcaaatgcactttttctataatacctgtcaggaagttaaaaagggccagagtgtctggtataaatgggattgataactaacagttgttgaacgctttctatgattctacccagtttgcattaattaatctccattaacctcatttaccttccctaataactatgacaatggttctcaaagtgtggtccctaggcagcagcatcagcagcacccaggaacttgctaaaaaggcaaattttcagcccccaccctagacttcaggaatcaaaaaccctgaggtggggcccaggaatctgtgttttgagaagtccttggtggattctgatgcacgtgcacgtttgagaacaagcagctgaagcatggagaagttacatcagttctgtggtccccaattgttagcagtggagcccagatttgagccccgaccactggcttcggaggccacactctgacgctgtgctacacggccatcttggtgagaaccaacagctgctcacagagcccgggtgctggaggagcagtaaggttaagctgtgggctgcgggcagtgagggcagggtttcctagacggcagctctccctgatttttttttgttttttgttttttttgtttattttttgagatggagtctcactctgtcatccagtctggaatgcagtggcacgatcttggctcactgcaacctctgcttcccaggttcaagcacttcttctgcctcagcctcccaagtagctgggactacaggcgtgtgccaccacacccagctaatttttgtatttttagtagagacggggtttcaccattgttggccaggctggtctcgaactcctgacctcaggtgatgcgcccaacccaccctcccaaagtgctgggattacaggcatgagcccctgtgcctggtctctccctgcattttgaagaaggcagaggacacagcacagagaccaaaataaaggcctagaggcaggaataaacaaaccaggtcgggaggggaggtgacatggggctgcttggctgggatgggaagtccacatgcaggaggaaaggagacgtgtggggggccgggctgtgggaagggaaaccctctgtggggcctgtccaagctgggagggtgcatgccctttcttcacggagctcacagtcttgcagggacaaggacatgaaagaatctcatgcacaatatcaaactgcaactgtgacaccggcttccaaggagaagctcagagtttttacagcaggggtccccagtgctatactgcacacccagatactggtctgtggcctgttagggactgggctgcacagcaggaggcgagcagccagcgagcaagcatgaccacctgagtcctgcctcctgtcagatcagcagcggctttagattctcatagcagcacgattcttatcgtgaactgtgcacgcaaaggatctaggttgcacactcacagatggtgcctgatgaactgtcactgtctcccatcacccccggatgggaacgtctagttgcagggaaacaagctcagggctcccactgattctacatgatggtgagttgtatacttacttcattatatatcacaatgtaataataatagaaataaagtgcacaataaatgtaatgtgcttgaatcatccccagctccctccccactctcaggcccatggaaaaattgtcttccatgaaaccaatccctggtgccaaaaaggttggggaccgctgtgtgacttaaggtcacagggggcaggggaggcttccctatggaaggaaactcacacatgtgtgaaggccccaagtgggaacatgtttagcaaaattccaggagctgaagcaaggccagagaggcatcggatggggctggggatacacaggggcctctcagcagccgggagggaagcctcttccagatcccctgcatacatgctcaccagccctgccctgacacacctgtcccctgacgacagactctggctccagcaggtctggcctgggaggacttcacccagaggagcaaaacattgtcaataaccagggatcggggagtaactcacgctgcccaaagtgcagcttgagggccctgggagccactgtgacgctactgtgtatgcttcatttagtatgcaccggaacaacaggaaaccagaatgccgcaccagcttcggatgaggctaagtcaaaataaataaataagaaagaaatcaatcaactgaactgattttaaaaatgtattaaataaacatgttgcaggtggctcctgaaggttgtaggcaaacctctaaagtttgggaaacaatgagggaatttgacacaaagaccatccttaggagggaccg[131 bp omitted]gcgagaccctgtctctacaaaaaatacaaaaattaggcaggtatggtggcatgcgcctgtagtcctacctactcgggaggctgaggtgggagggatagtttgagcccaggaaatggagtttgcagtgagccgagattgaaccattgcactccagcctcagcaacagagtgagaccctgtctcaaaaaacgaacaaacaaaccagtaggacctgaactcaagttcactctctcagactttccccacccagctcctggaccccaccagaattcaacacatgctcactgagcacctctgtgtgccaggcctatgctgggccccagggtcacagcagtgcccaaaaagaatcactctgtgacctcccagagctgacattctgcagaagagacagacaacgatcagaaagacaagcaaacacatgaccgcacatctgacagtgaaggaactgcagaggggtgcaaggtcaggctgtgctgggtcaggctgccatttcagaaagagaagtcatttgacttgagaccagaaggaagtaagggagggagctctgtgggttcctggggaatgtgggtccagggaaggccaaaatcgagtgcaaaggcccctggcgagaatgtacttgttaccttcatggaacaagaaggaaagaagcatgcttgagtggagtgatggagccagagtggttgcccaaggaagctcgattacacagggccttgtaggccacaggcaggactggggcttgtttgtttgtttctttgtttgtttgttttgaggcagagtatcgctctgttgcccaaggaagctcgattacacagggccttgtaggccacaggcaggactggggcttgtttgtttgtttctttgtttgtttgttttgaggcagagtctcactctgttgcccatgctggagtgcagtggcacaatctcagctcactgcagcctctgcctcccgggttcaagcaattttcctgcctcagcctcctgagtagctgggattacaagcatgtaccaccacgcctgtctaatttttatatttttagtagagacggggtttcaccatgttgaccaggttgctcttaaacttctgacctcaggtgatccacccgcctcagcctcccaaagtgctgggaatacaggcgtgagccatcccgcccagcaatggaatttaatcctaggttttttttttttttttttttttgagatggagtctcgctctgtcaccaaggctagagtgcagtggcatgatctcggctcattacaacctccgcctcccgagttcaggtgattctcctgcctcagcctcccaagtagctgggattacaggcacgcaccaccatgcccaactaatttttaatagacacggagtttcaccatgttggccgggctggtctcgaactgctgacctcaagttatctgcctgcctctgcctgccaaagtgctgggattacaagtgtgaaccactgtgcccagccaggacttgggctttcaaagagcgcgttgagaagccgctggagaagtgagttcggaggggtgtgatggcaggcttgaggcttcagaggcccactggcagctgcgtggacagtgagcacaggctatcagtggaggcagggacagggcttgggaggccctggccattgtccaagagagaggaagtggagatggggagaggggtggggtcaggacccattttggaggaggaagtggtgagactcacttgaagagtcaaaggtgactccagcagcttccttaagaggttgaagaaagcaggaggggcaggttcagtggagaacgcaagagtgatctactccggccgagttcaggcccagggaggccctcagggacagggaaggcagatggcaccccctccctgggaaatgccaagccgaggaagagtcagaacacatgacacagtgactcagagagatgggggcagacgctgagatgagggttggccaggcaggaaggaaggtgagaaggtctcatggcctcacgtgccagtagggctgggccaccacgtgtgggagggaggacacccaggcaccaggccatggtcatgacacgggtctctttgtccctcccggtctgccaacctcctgagtcactcctgacggagatgactgatccatccctggcccgcctcccaccctgtccctgggacagtgcctggggcaggcagctccattatcctccttgatgaaagagctcccagccagcactggccactccagagcctcctccccaggtgggtgatcatgcagggctgggctcttgcgactggccgggggtagagatgcaccgcactgctgagaagtgctttctaggagttcaagaccagcctgggcaacacagcagacattgtatgtagaaaaaaaaatgtttaaaaataagctgggcacagtagtgcatgcctgtcatcccagctactcaagaggctgaagcaggaggaccacttgagcccaggagtttgaatctgcagtgagctatgagtgcaccactgcatgccagcctgggcaacagagtaagactcagtcactaaaaaagaaaaaaaaaaagatcgaatgtggtgctcatgcctgtaatcccagcactttgggaggccaaggcgggcagatcatctaaggtcaggagtttaagaccagcctggccagcatggcaaaaccccatctctactaaaaatacaaaaattagccaggcgtggtggtacgcgcctgtagtcccagctactcagaaggctaaggcaggagaattgcttgaacctgggaggcggaggctgcagtgagctgagatcgcaccattgcactccagcctggacaacagagtgagacttggtctcagaaaaaaaaaaaaaaaaaaaaaaaagaaagaaaagaaaaagggggagaaaaaaaggagaagtaggcgagcctctttctttccccactcttctcgctctcaactccaggctgctccttaaacaggaggtgacaacctcaacctcgcaaattaaaaaaaaaaatcttttaattttgaaataattatcacaggaagttgcaaagatagaacagagaagtctggcagcagctgagccaaaggccccttcccaccctagagctcgatctgcctggggagcgggaaggaaatgacagtttagtcccaaagggcctctctgtgaagctcaggctagggctgagtagccagaggtgggtgaattaatgtctgcagggagtgctgggtcagcagcgtaagtgacaatgtctggaataatgacagctcacttttacagagagcccgttccatagcagccaccatgcaaagtgctgtaggggctggggacctgtcacagcatagccctgaagtcataacagcaatcttattatcaccctgggagggaaactgaggtgatgtcacaacaaacacgtggcagacctgggactggaacccgggtctttttaccacatgcttgtcatgggatgtgcgagttgctgagtgtgtcctgtgtgtgctgtcaccagcccggtgaggaaggcactatcattgttcccgtcttaccatcctgggcagaggttggggggtgagggggacatagccaggcagggagtagccacccagggctcacagggactctgttagttgcctgctttcactgcttccctggtaaaggggtgacagtcaagtcaccaaaaaaggagaccaacgacctgtttgaaggaacagggaggaagagtgaaagcgccgaggctgcgttctcaggagtcctgctcctcctcccttgccttctccacgcagcccttggcctccagaaatcaagacacgtccacaagcccaatctcctcctgttagaagactatgagccacacctggtgctgtggcctgcagaaacctcagctactccttctaggtgaggagcaggaattcaagccccaaagggtaccctccctgagacctttgggacctggccacctggcttggagtcccccattgagattcctgggattaaaaaaataaaaatatacggccaggtgcggtgactggctcctgtaatcccagcatcttggaaggctgaggaagtggattgcttgaggacaggagttggagaccagaatgggaaatgtgagaccccgactcaataaaaaataaaaaataaattaacggggtatggtggctggtacctgtagttctagttactcaggtggctgaggattacttgagcccacctcaagttcaaggctgcagtgagctatgatcacaccacttcactccttcctgggtgacagagcgagactgtcttaaatttttttttttttaataagtatagattcacagaagttgcaaagatagaatagagaagtctggtgtactcttcacccagcatcccctgatggttacttcttaagtcattcaggacaatatcaaaaccaggaatttgacattggtataatgtgtgtgtacagttctatgtcattttatcacatctggatgtatataacaacaactgcagtccagatacagaattattctgttactacaaagacctcccttgtgctactcccttcatagtcagacactttcccctaccatccctaacccctggcaacttttcatcttctccacctctatcattttgtcatttcaagaatgttatgcctgggcgtggtggctcacacctgtcatcccagcactttgggaggctaaggcaggtggatcacttgaggtcaggaatttgagaccagcctgaccaacatggtgaaaccccatctctactaaaatacaaaaattagccaggcatggtgttaggcaccttaatcccagctactcgggaggcttaggtagaagaatcacttaaatcctagaggcagaggttgcagtgagccgagatcgagccactgcactccaacctgggggacaagggcaaaactccgtctcaaaaaacaaacaaacaaaaagaatgttgtaacacatgtgatccttggagactggcttttttcactctctgtaccactcttcagaatcgtccaagttgttgcctgtatcctcttcatatctcactcctttttattgctgcatagtactccatggcatggatgtaccgtaatctgttaagccactcacctagtgaaggacgtattggttgtttccagtttttggttttgcttttttttttcttgagatggaatcttgctcttgttgcccaggctggagtgcaatggcgtgatctcggcttaccgcaacctctgcctcccaggttcaagcaattctcctgcctcagcctcccgagtagcttgtgttagaaatgcttgatttttggtgctgtaaagaaatagcactttaatgtaaatttaatttcttcagcaaggctagttttactttctgcagaaagggtatactcgctagcagttttgctacaaaagtacactgaacaaaggagacagggtcatttataacttgatgcatctactttattgctgtgtctggtttctattggctgaaacgggacctcacattctgtatttgtctggattggctagcaacttagaactttttaaaagaggcaaaggcagaggagaacaaaggaaggagaaagtaacgtggaatactgagaaaagtaaaaacatttctaaataaggaagaggaacaggctttgacttaatgctttcttggactagtataagcatgctagggcaaatctttaggctaaattgtaggatctaagaacataaagtacattgatttttttattatggctagtagatatttaagaatgttagcacaggtctttgaataaattttgcttctaagagaagttactatttattcttaattagatggggaggacagtctctttgaaaaggaacttctactttactatttacactgggattaccagcatgtaccgccacgaccagctcattttgtatttttaatagagacaggatttcacaatgttggccaggctggtctcgaactcctgacctcaggtgattgccctccttgg[138 bp omitted]taattgtgtgcaggtttttatgtggacatacgttttcatttcttagggataaaatgcccaggagtgcaattgctgggtcatctggtaggtatattttgtttagtttttcaggaaaccggcaaactgttttccagagtagctggaccactttgcatccccaccagtcgtgtgtgaatgtttcaagttcacagcatcctcaccagtgtttggtgttgtcattattggttatttaattttagctgttctaaagcggtatcttgtcatgggtttcaatttgcatttcactaatggctggtgatgtgagacatcttttcatgtgcttatttgccttctatataccttcttcagggaaaggtgtcatcatgtcttttgcctattttctaactggactgttttttatttatttatttatttatttatttatttatttatttatttagagacagagtctcactctgtcgcccaggctggagtgcagtggtgggatctcagctcactgcaacctccgcctcctgggctcaggtgactctcctgcctcagcttcctgagcagctgggattataggcgcacaccaccatgcctgctaatttttgtatttttagtagagatggggttttgccatgttggccaggctggtcttgaactcctgacctcaggtgatccactttgcttcccaaagtgctgggattacaggtgtgagccatcgtgcccagcctgatttttattttatatatatatatatgtacacacacacacacaatatacatacacacacatatatgcacacatatgtgtgttaaagctgtatgtaaagctgttatatattacatatatactacatatataacagctttgctgagatataattcacataccataaaacacacccatgtaaaatgtccaattgaatggttttgggtctattcactgaattatgcaaccatcaccacaaccagttttagaacatttcatcaccccaaaataatctcacatccattagcagtcactcttcatttcctcttacctttcccaccccaccccagccctacgcaaccgctacatctacttctgtctctacagatttgccttttctgaatatttcacgtgaatggaatcatacaatatgtgacattttgtg[136 bp omitted]catggtaaaaccccgtctctactaacaatatgaataattagctgggcgtggtggcggatgcctgtaatcccagtcactcagaaggttgaggcaggagaatcgcttgaacctgggaggcagaggttgcagtgagccgagatggcaccactgcactccagcctgggcaacaagtgaaactcggtctcgaaaaaaagttcatccatgttgtagtatctatcagtacttcattcctttttattatcaaataatattttattgtttaggtctcccatattttctttattcattcatctcttcatggacatgtgggttgtttctgctttttggctttcatgaataatgctgctgtaaacatttgtgttcaagtttctgggtgaacatgttcttatttctcttggttatatatgtaagagtggagatgcaggagtgtatggtaattctatgcttaatctttggaggaactgttttgagacttttttccagagtggctggacaattttatattcacactagcaatatataaatgatttagtttccatacatctttccagtatttgatactatcttttattttagctgttcttatagatgttagtagtgatatctcatcatggtcttaacctgtctaaaggctagtgatgttgaatatctttttagataattattttctatccatatatccccttgggtgaaatttctctttatatcttttgccagtcttctaattggatgatttgatttttttatgtagtgtttctatgttgaatttgagagttctttatatatttgttctagataggagtcctttgtcagatatgtggtttgcaaatattttctcttagtctgtaatttgtcttttcattctcttaactaggtcttttacagagcaaaaaaaaattaattttgatgaagttggattgatttttttagggatcatgcctttggtgtcatgtctaagaacacttcatcaagctctaagtctcacagattttctcctatgttatcttccagaggttttttgtttttattttattttactttttaattaagacagagtttcgctctgttgcccaggctggagtgcagtggcaggatctcagctcactgcaacctccgcctcccaggttcaagtgatcctcctgccttggcctcctgagtagctgggactacaggcacgcaccacccaactggctaattttttgcatttttatgtggttgctttcgagaattttctctgcctcttgtttttagaagtttgactatgatgtgtcttggcatgaatttctttgggtttatcctgtttgtgatgcgctcagcttcttgaatctgtagacatatgttgtgcgtgtgtgttgtcaaatgaagataatttgcagccattacttcttggaatatttttttaaggcccaccctccttttcctccccttctgggacttcaatgacaaaatgttagatcttcttttattatagttactcatgtccttgaggctttgttccattttctttcatctattttctttccattgttcagaatgggtaatttctattgttatacgttttgtttcactgcttctttcttctatactctccattctgctattgagcccatccattatggtttttatttcagctcttgtattttttagttgtattttttagttctaaagtttccatttggttcttctttatattttctatttctttgctgatactttttattattttatttgtttcaagcacatttataatttctcagtgaaacacttttatgatggctgctccaaaatctttgtcagataattctaacatctgtgtcgtcttgatgtttgtgtctgttaattatcttttgttattcagtttgagaatgcctgattcctagtatgacaagtgatttgccattgaagtcaggatattctgggcactgtgttataagattctggatcttctttaaatattttgttttagtgggcttccctttatactgctccagcgaaataaagtagggcactgcctgattgcttccagacagggataaaagtccaggttctccatccagcctttcctgaacctggggggttgggagagatgaggcctccatgttattgtttggtaagggtagaagttcaggttccccactaggaatccatgacaactccctggctgggagtgggagggatgcttcattactgctccctatgtggctttcactgacactgtgtgtggcagagagaggggggtgcttgttaccactgagtggtggcgaaagtcccaactctccaccaggccccctttgacactactccaatggggccgggtggaatgcctcatttctgcattggggtggcagtggatgtccaggctgcccacatggtttccaccaacaccacatcgggggagggtgatcccagtggggaggaatgtcccagctccaactctagcatcactctggctgagtatgggagtggcctagggttctttgttacagcctggtgaaggtgaatgtctaggttttccatccggcctttgctgacaagggtgatgatggaacttggatggagcggagcaggtatggactaaaagagctctgtctttctaggatgcccctttcctcgttctttggctagaaaagcatagttttgctagaacttgttctgttgggactttttcttgtttgtgccccttggcattttcagttgttggcttctccagtattcagcctgagatatatgaggcaaagagaaatcccagggaattcaccaccattccttaagtcccgaggttcctaaccagtctgcttctctccatctttcagtcttcttatgcttgtcttgtcacgttcaaggttttcagttatacttggcagaataaataaatacatctactccatctttccagaacatcactgctttttgttcattttatttatttattatttactgagacaaggtcttactttgttgcctgggctggagtgcagtggtgctatcatggctgactgaagccttgaactcccaggctcaagcgatcctcctgcctcagcctcccaagtagtttggaccacaggcatgggccaccatgcccagctacttttcattttttgcttttgttgactagccccacagagttttgctgtgttgttcaggttggtctcaaacttctggccttaagcaatcctcttgccttgctctcccaaagcgtattacaggcataagtcaccacacccagccctatcggtgcttttggaagaaggtgttcttccctctctctgtttccctccctatggccagctgcccatagagggcagtggtgctggagtgaagacctctcagcgcatccctcttcatctgtaggatgtgcatggcttccaatgctgtctgttctgctcctgagacactcgctggctacaggattataaaggtgatgaggtttcagcctaaagactctccattcaataacacttcctacaagatatcttttttgtttttttgagacaggatctggctctgtcacccaggctggagtgccacagcgcgatctgctcactgcaacctcagcctctcgggcttaagtgattctcctgccttagcctcctgagtagctgggaccacaggcgcccgccaccacacccagctaatttttggattttttttttttttttttttagtagagatggggttttaccatgttgcccaagctggtcttgaactcctgagctcaggcaatccacccgccttggccacccaaagcgctaggattacaggcatgagccaccatgcccagtcctacaagatatcttttctttttctttctttctttctttctttctttttttttttttgagacagagtctcactctgtcacccaggctggactgcagtggtgtgatctcttctcactgcagcctccgcctcctgggctcaagtgattctcctgcctcagccccctgagtagctgggactacaggcgcctgccaaaacacttagctaattttttgtatttttagtagagacggaatttcaccatgttcgccaggctggtctcgaattcctgacctcaagtgatccacccgcctcagcctcccaaagtgttgggattccaggcatgagccaccgcacccggccgagatatctttttcctcctcaatatctatgtgctcctccctcaacccttgggggcttcagtgtaggtggtcagattccccaccatttatgcctatgatgaaaagagtggaaatggtaataactggatggtgtcactaaactacaaatactttcaggtaggcctgtgcctttttcagcgggctgcagttctcctgcttggcttgagtcattcgcatttcctgagagctgggtagagggggagttgtggaggagcccattctgaaactgatctgatattgcaaacccatacacggaaaggaagaactgcccatacgtattcgagtcttccaatctgactccgagcccgcatccccctcaatcgtctcttttccccactccccagatcacggtgctgcttggtccccctcagagccatagagaagcagggggtgtggccatggaggggaaacctctgtcaccagagactttactgtacttctccttttgctctcagatgctgccagggtccctgaagagggaagacacgcggaaacaggtaaaaatcattttgcttttattttgcattcaacaagcaagttattacggaacagcagttatgggccaggcatacctcccagagctgggaacacagtggggacctccctggctctctcttaccggtgttacaacaggttgtagacagacccctgtcttgagcatcctccttgccaggcctgctgagtcttctgagagtagggtaggttattggatgcccaggagggaagaaggagccagggaggtcagccccaaggttctgcaaggccctcaacaggcctggactgaggaggtctggacagcatggccctgtcctgagcctctgtgcataataactgctgtccctaacctccaccccaccctcagccttccaattcccgggcctggggccctactcctgtgctccagagactcctggagctccttgaggcagcacacagtcctgctctggaggcgcccatctcccactcatgctgggatgctccagcccgtcccagagcaggttgtggctggagggtgctggcagaggagggacaatggcccggctcctggaggcaagtgttggctgcagggaacggagtctagtccttgccacagcccttgttaccccttaggtaaccttaaggggatttcaaagaactctggctctgcaaccctgctaagttttttatggaacatgtaaaatagatcccatggccaaagaagtatggacaatgtattatactatactctaatccccatgtctagagattaatggtgtagatagagtttactgaaaggtttttaaagtcctgcagtaaagaatcttacttaagccaggtgcggtggctcacgcctgtcatctcagcactttgggaggccaagttggggggatcacctgaggtcaggagtttgaaaccagcctggccaacatggtgaaaccccatctctactaaaacaaacaaacaaacaaacaaatcagacgggtgtggtggcacatgcctatagtcccagctactcaggaggctgaggcaggagaatcacttgaaccctggaggcagaggatgcagtgaactgagatcacaccactgcacttcagcctgggcgacagaagaatgagactctgtctcaaaagaaaaaaaaagaatcttacttaactcttttaccctgcctttctcaagtgtatgtgaccttgaagatgttttttgcatgtgacatgatgagtacctgcggggctgatgtcagctctgcctggggaatctgcctcagcttcagaccctgcaccccaaattcatgcttagcccaggccagacccccttcctgctgtcggcaagcagcttagctttccgcacacccatgaacagatacccagcagcctttggcatgagccatgtggcccgaggagataaacagacagagagaggaacattgatgcgtgtgaaatgttggcaggtgagtgggaggggcttgggttggtgctgagaccggagacacactctgctgtcacatccttcagggtccccgggggccagcacggagggccatgatcatgtaaattgggacttaaatttaactctatgtaaatataactctatgcagaggtcagggatggtagaggacaagctcactgcagagaaagaaagaaagatgggcaacagttgcagaacctaacccacagataggttttgtttgaccagctctgtacatttttagtttattttttatctttttgagacagggtcttgccctgtcgcccaggctggagtgcagttgcatgatctcggctcattccaacttctacttcccgggttcaagcaattctcctgcctcagcctcatgagtatctgggattacaggtgtacgccaccacgcctggctaattttttgcattttgagtaaagatggggttttgccatgttggccaggctggtcttgaactcctgacctcaagtgatctgcctgccttggcatcccaaagtattgggattacaggtgtgagccactgcgcctggctcacccatactttgttactggttttagaattcctttttacctggtctttcaaaccaagttttgaccatgtctgtccctgagtataatccttgatgagtagcaccagagagagctccacgttacccggggcctggcattcaaagcactcagtggtctggtgccactcaaagcctgtgagccaggcaggaagtttataaaattagagatggatgaatggatggatgggaaaaagcaagcaagggaggaaggaaggaagaaaggaaggagttctgggaagagagagaggctgcccccgcagggctctcagtttgaaggagaggtgcagcacactcagaaaaaactcccggccaggagtggtggctcacacctgtagtgccagcactttgggaggccaaggctggcagatcacctgagatcaggagttcaagaccagccaggccaacatggtgaaaccccatctctactgaaaatacaaaaatcagccaggcgtggtggcacctgcctttacccagctacttggggggctgaggccagagaaacgcttgagcctgggaagcagaggttgcagtgagcggagatcacaccactgcactctagcctgggagacagagcaagactctgtctcaaaaaaaaagaaagaactccgtgagcatcccaaatgccacatccccataatgcaaccagacccggtcctcccggatccaggggaagggtcggagctcagtgggtgagcaagaaaagccacgtggaagaagtaagcggccagatggctcaaagacaaactctcccctgctcaggcttgcacccagacacgacaccatgcatctcctcggcccctggctcctgctcctgggtaaggactgtggcctgggctagtactggggttctgggatgtcagtgggcactggaggaggaggaaagacccaggcagagaggcgtcaacatagggtagggtgggggcagcggtgtgtatagataaatgtacatacaaatatatatgtttcccatatatacatacacttctctcattgcatcctgctgtctttgtgtatctctgtatttctcccactatcttcagagggaattctttagtctttagaaagctctctgctgggtgcagtggctcatgcctgaaatctcagcactttgtgaggctgaggtgggaggatcacttgaggtcaggagttcaaggccagcttggacaacatagcaagacccctatctctaaaaagaataaaaaattaaacaaattttaaaataaaaaataacttttaaaagaaggctctcatgcccccttagtaatgctttctgatcactgtggtgagttctagaatacttggctttctctgactcaagtaaatgggtttttgagcaccctgaaaccctctacgcctgggagggggcctgcgtctggatcccctgcacctacagagccctagatggtgacctggaaagcttcatcctgttccacaatcctgagtataacaagaacacctcgaagtttgatgggacaagactctatgaaagcacaaaggatgggaaggttccttctgagcagaaaagggtgcaattcctgggagacaagaataagaactgcacactgagtatccacccggtgcacctcaatgacagtggtcagctggggctgaggatggagtccaagactgagaaatggatggaacgaatacacctcaatgtctctggtaaggccttcggggagcgggtcctctgctctgggcaggggtgagtgggaggcaggaaatacctgactcctggcacagagctcacaaaccgagcttcctgcagagctcaggcaggggacgccagcggatgacgatggcgatgcagcagcactagacagagctgcgggacctcggatgtcccatctgaccctcagttcctgcccctctgggacctggattccaaagttatcggatctcctgatctttccctctttctttctcaccatgtatttttcagcttttgtgacaaactcgtgtttggccttagtactggaaccatccaagcaccgcattcctttagtggggtgggtctgcatgtaaccagcctcagctctcccccaggctggaccgcccccttcagacattggggtctgaagctgcatcgctcaccccaaacttagggctgctcagagctccctatagaggaaactgggtgtggaacggagtaaccacactccctagggcagaggccccagacctgtgtttgatgggtcaaatccacccctacatgtgcagtgccataactgagcctgtgttataaaaatcataaaatgtttgttttactttttttcctcttcttttccccttccccttcctttccctttttatgagacagggtctcgcactgtcatcacccaggctggagtgcagtggcgcgatctcagctcactgcagccttgatctcccgggttcaagcaatcctcccacctccaaagtagctaggatcacaggtgcatgccaccatgcccagctaactttttaatttgttgtagaaatgggtcttgctatgttgccaggctggtcttgaactcctggcctcaagcaatcctcctgcttcaacctctcaaagcattaggattacaggcatgagtcaccgcacccggcctgatcttctgatttttcaagagacgatggaaatctagattttccagtgaaatctcccagcatgttaatgttcatggcaagttctcatgagctcttcaaggtcagatgacactgttgttgaaccccaaaggccaggtttgagctcccgatgcgtagtcagccaaacactgacacctcagtgcttagaagctgagataggattatttaatttagccaaagcaaggggacagaagagagaaactctcaaatctgacctgactttgagcgttagtgggggcttttatgagtaaagtaggtgtgcaggaggtgacctcccgatcgtcaaagctgttgtgcccctcggctcatcaaatttctggatgtcatcaaggaggtctgtgtgacctaaggatcattgttctttgaaagagagacaagttcatttatcttgcaggcagctgccagggagtcaggatgtaagttaaacaattatgagtgaattaatggttacctgctactgaaatgaccaaatgtaactaatcatgcatggaggaaggaaaggacaaagagaaaagaaaagaagtaaaacgaacatcttataatttttataacataggttcagttatagcactgcacatgtaggggtggctttgacccatcaaacacaggtgtggggggcccctgccacagggagtgtggtcactccgttccacaccgtttcccggatgggcagttctgagcagccttaaatttggggtgagcaatgcaacttcagaccccgctgtctgaaggaggtggtccagccttggggagagctgaggctgggtgcacacagacccactccactaaaggaatgcggtgcgtggatggctgcaatactgaaggaagccatgaaagtaacacaagtttgtcaaagctgaaaagtccgtgaactaaactgataaaattcacttagaggtggtgggaataggccgggcacggtggctcacgcctgtaatcccagaactttgggaggccgaggcaggcggatcacaaggtcaggagatcgagaccatcctgactaacacagtgaaaccctgtctctactaaaaatgcaaaaagttagccaggcgtggtggcaggcgcctgtagtcccagctactcaggaggctgaggcaggagaatggcgtgaacccggaaggtggagcttgcagtgagctgagatcacgccactacactccagtccgggcgacagagcgagactctgtctcaaaaaaaaaaaaaaaaaaaaaagaggtggtgaggtggtgggaatagaactttgcaatcattcagaaagcagacatccggcaatgagcatgaaagaaaagtagatcacagttcccaaggaggcttagtgtggtcaaggcctttcagaggggatttcgggtgagcaaaagtgattcaaagtggagaaaagcaggactgcgttgggtgcagtggttcccgcctgtaaccccagcactttgggaggctgagatcggaggatcgtttgagcccaggagtttgagaccagcctgggtaacatggcaagaccctgtctctacaaaatgtttaaaaaactagctaggtgtggtggcacatgcctgtagtcccagttactcagggggctgaggtgagaggattgcttgagcctaggaggttgaggctacagtgagctaggattgcgccactgcactccagcctgggtgacaaagcaagaccctgtctctaaagaaaaaaagaggccgggtgtggtggcttacacctgtaatcccagcactttgggaggccaaggcgggaggatcacttgaggtcaggagttcaagaccagcctggccaacatggcgaaaccctgtctctactagaaatacagaaaaattagctgggtgtggtggtgggcacctgtaatcccagctactcgggaggctgaggcaggaggatcacttgaactggggaggtagaggttacagcgagccaagatcgcgccactgcactccagcctgggtgacagagggaaactccatctcaaaaaaacaacaacacaacaacaacaacaataacaacaaaaaaacaaagcaggactggagagaggtggaatgaagtggcaaggggttcctgaggggtgatttgggacaggacatctaaagccaggtgtacgctcacgtcctcagtcccccaggctcctgcacgggctctgttcttttgcagaaaggccttttccacctcatatccagctccctccagaaattcaagagtcccaggaagtcactctgacctgcttgctgaatttctcctgctatgggtatccgatccaattgcagtggctcctagagggggttccaatgaggcaggctgctgtcacctcgacctccttgaccatcaagtctgtcttcacccggagcgagctcaagttctccccacagtggagtcaccatgggaagattgtgacctgccagcttcaggatgcagatgggaagttcctctccaatgacacggtgcagctgaacgtgaagcgtgagtctccccggcatgcctgtgggaagggcaaggtctgtgtcaccttctccccagccccgcagggggcatgcacccagggcagggggaagcctgcacagacggcggcatcctccagccctggtcacgccgccttgtcagccctggtgtttcgggaaaaagatttgctctagcctaacagaataaaatggtccatcctcaagccatgacatgaattggggattatctggttaggtctttttgttcccctcttggtggggatttttttcgcatcattatcttgtgcctcattcattcaataaatacgtatcatgaacctactaggtaccaggccttattacggctgccaatggggggcatggggcggtgggcagggtgcagcagtgagcaaaactcttgccccacgcggagccagcgctgcagtgaaagagacagacaacaaatggattaccaaagaaatacagagcatgagccaagacattagaatctggaacaaagcaatgttaacaaagaaatatacaacactattgtaggtagtgatatgtgtgttaggaaaaaaataaggccgagagaggggagtgatggagagagacctctctaagaaggtgagcacttaggccgggtgcggtggctcacgcctgtaatcctagcactttggaaggccgaggcggggggatcacaaggtcaggagatcgagaccatcctggctaacatggtgaaaccccatctctagtaaaaatacaaaaaattagccaggcatgatggcaggcgcctgtagtcccagctacttgggaggccaaggcaggagaatgacatgaacccaggaggcggagcttgcagtgagctgagatcgcaccactgcactccaacctgggtgacgagtgagactccatctcaaaaaaagaaaaaaaaagaaggtgagcacttaagctgactggaacggagggagtggctgaggccggcacatatttgggagaggaggatttcagggaaagagaagggcaggttcaaagctttgaggcagcagctgggtgggaggacctcagaggctgaagttcaccgcctctgagggccacatggtaggacaggaggcaggagatggagcaggactctggatcccgagggctgaggtgagggtttgggattctatgcaaagcacagaacccgctcgtggtttccagcaggattggcgaggtctggtagatggtgttaggaaccctgcgtgctgctggtggagaccaagaagtagaggaagtgggagggggaagctgagagccgagttaggaggctgtgaccatcacctgggtgaagggactggcaggccatggctttgtcagaataaaagcactttccacaccctccaccctctgaggattccccgccccctccccgactgcccctctgctcctccagacaccccgaagttggagatcaaggtcactcccagtgatgccatagtgagggagggggactctgtgaccatgacctgcgaggtcagcagcagcaacccggagtacacgacggtatcctggctcaaggatgggacctcgctgaagaagcagaatacattcacgctaaacctgcgcgaagtgaccaaggaccagagtgggaagtactgctgtcaggtctccaatgacgtgggcccgggaaggtcggaagaagtgttcctgcaagtgcagtgtgagcccctcggagctggggacaggccaggcagggaggtagcaggggtggacccggagaggggagccacgggggctctcggggccgtgtgcacaggttgggggtgctctcctcacccctccactcgcctctgccccctcttccagatgccccggaaccttccacggttcagatcctccactcaccggctgtggagggaagtcaagtcgagtttctttgcatgtcactggccaatcctcttccaacaaattacacgtggtaccacaatgggaaagaaatgcagggaaggacagaggagaaagtccacatcccaaagatcctcccctggcacgctgggacttattcctgtgtggcagaaaacattcttggtactggacagaggggcccgggagctgagctggatgtccagtgtgagtagccacggagcctctggttctagggagagaagatggacacagggaacggggaaggcagatggggtgcagggcattccggggtcctggagtcaagagcaaggagcagccagggtctcctgttcacaactgctgtctcagctcctagcatagggcctggctcatggagggtgcttggtagatgcttgtttttttgtgttttagttttttttgagatggagtctccctctgtctcccaggctggagtgcagtggcacaatctcggctcactgcaagctccaccttcccgggttcatgccattctcctgtctcagcctcctgagtagctgggatgacaggcgcccgccaccacgcccggctaattatttgtacttttagtagagacggggtttcaccgtgttagccaggatggtctcgatctcctgacctcgtgatccacccgcctcggcctcccaaagtgctgggattagaggcgtgagccaccgcacccggcctgtagatgcttgttgaatgaatgaggccaggtgcggtggctcccgcctgcaatcccagctctttaggaggctgaggcaggagggtctcttgaacccaggagtttgaaaccagcctgggccacacagcgagataccatctctacaaaaaaatacaaaaattagctgagcatggtggtgcgtgcctgtggtcccagctactggggaggctgaggagggagaatcacttgagcccaggaagtgaaggctgcagactgaactatgttcctgctactgcactctagcctgggtgacagagcaagacctgggtctcaaaaagaaaaagaaaatgctgggactgggattataggtgtgagctgggcacagtggctcacacttgtaatcccagcactttgggaggccaaggtaggcagctcacttgaggccacgagttcaagcccagcctgggcaacatggtaaaaccccatctctacaaaaaaaaattagcctggcatggtcatgcatgcctgtagtctcagctacccaggaggctgaggtgggaggatcacctgagcctggaagtagaggctgcagtgagcctgtgatcatgccgctgcactccagcctgggtgactgagtgagaccttgtctcaaaaaaaagaatggattggccaggcatggtggcttacgcctgtaatcccagcactttgggaggccaaggtgggcagatcacctgaggtcaggagttcgagaccagcctggccaacatggcgaaaccctgtctctactaaaaatacaaaaaattagccgggcatggtggcaggcacctgaaatccacctacctgggaggctgaggcaggagaatcgcttgaacccaggaggcagaggttgcaatgagctgagatcatgtcactgcactctagcctgggtagagtgagattctgtctccaaaaaaaaagaataattaactgcaagataccaggactccatgagggacacagagacttagcgtccctaggcagtggctgagtcttgagagatcttgaaatttttaatgagaactggggcaaactgtctcattacctctccattgtaagacccttttaacacagtgaatcttgttaccatgtagagcacaggacaaaaagaacacataagctcgatccttggaccctgagatgtcatatgtgctaacaggacaggggtgcccaaatcctgagcatctcagacagctggatgcgtgaccacagcagccacagtgatgtttgtggagtgtttgccacacgccacactctgctctaagggagtcatctcatttccttcttgaaacaattcccaggaggttaggaactctcaggactcaccccccacccaccccgcactgcctcttgtttttaagatggagtctccctctgttgcccaggctggagtgcagtggcttgatctcggctcactgcaacctccacctcccgggttcaagcgattctcttgcctcgaccacctgagtagctgggactacagacatgcaccagcatgcatagctaatttttaaaatttttagtagagacagggttttgctgtgttggccaggtctcgaactcctgacctcaggtgatctgcccacctcagcctcccaaagtgctgaaattacaagcgtgagccaccatgcccggcctcaggaccccatttgacagacgtgtaaactgagacctgcagcccatgcccgtgcgcctctcagcagccgtctggcttcagcgctgtgccctgaacccctgcaccaaaccacagccaggccagagagccagggcagggtttctgttctcacacagatgcaggaaggacgcacaagcccccctttgattaatttaggacctgtgcagatgcccgggacaggtagcgggagaagaggaagcaggagggaaggggtactgtggacagctggcttttctttactcacctctctggttttcttccagatcctcccaagaaggtgaccacagtgattcaaaaccccatgccgattcgagaaggagacacagtgaccctttcctgtaactacaattccagtaaccccagtgttacccggtatgaatggaaaccccatggcgcctgggaggagccatcgcttggggtgctgaagatccaaaacgttggctgggacaacacaaccatcgcctgcgcagcttgtaatagttggtgctcgtgggcctcccctgtcgccctgaatgtccagtgtgagtccctgggctaggcagggggatctgggaggtggcccggctgggatgaggggatgaaggcaacgaggccggagcctgggccagtgtcttcaacagaattgagggacaggagcctggcgtcagggccaaggggaggggaggcctggggacagcaaaagggacagggagcggagaggtcagcttgggacccttgccctccagatgccccccgagacgtgagggtccggaaaatcaagcccctttccgagattcactctggaaactcggtcagcctccaatgtgacttctcaagcagccaccccaaagaagtccagttcttctgggagaaaaatggcaggcttctggggaaagaaagccagctgaattttgactccatctccccagaagatgctgggagttacagctgctgggtgaacaactccataggacagacagcgtccaaggcctggacacttgaagtgctgtgtgagtgagggccggaggctgggagtggagcagagaagggaccagtggcctgcctggtagtgacttcgcaccccctccccctgcccgccatgcagatgcacccaggaggctgcgtgtgtccatgagcccgggggaccaagtgatggaggggaagagtgcaaccctgacctgtgagagcgacgccaaccctcccgtctcccactacacctggtttgactggaataaccaaagcctcccctaccacagccagaagctgagattggagccggtgaaggtccagcactcgggtgcctactggtgccaggggaccaacagtgtgggcaagggccgttcgcctctcagcaccctcaccgtctactgtaaggcctcttcctgctcttgttcttcttggtggtggtcagtccttccttccttccttccttccttccttccttccttccttccttcctttctttctctctttcttttcctcctcctcttcttcccctcctcctcctcttcctccttcttcttcttcttctgctttctccctctcctcctcctctttcttctccttctccttccttcttcttcttcttatagagacaaggtcttactctgtcacccaggctggagtgcagtcgcataatgacacctcactgcagcctccaattcctgggctcaagcaatcctttcgcctcagcctcctgagtagctgggactatagacatgcaccaccacatccggctaatttttacatttttgtagagatggggtcttactatgttgaccaggctggtttcaaactcctgacctcaagtgacccttctgcctcagcttcccaaagccctgggattagagccatgagccactgtgcctctccctgtttcctctcatgctcctctctggccctgtctcctccagtgacttcccgaaaagccttccagaccagctggccccttcttccccacctcactgtcccctttcccattcacaccccttgctccaggccatctgccgctgtgctggaggagtcgtcttgtcctgcgtcaccagtctctctttttctacctcccctgcagtctctcctgcctccctctagggtcccctctcaggctgctccaccttccagaagtcctgagctcctactgggtccctgtctctctctctctgactactctgtctctctcagccctgacaggctccttgtttttatcttttaaaacgtaaatgattttttttttaaacggagtctcgatctgtcacccaggctggagtgcagtggcgtgatcacggctcactgcaagctctgcctcccgggttcacgccattctcctgcctcagctccccgagtagctgggactacaggcgcctgccaccatgcccggctaattttttgtatttttagtagagatgtggt[134 bp omitted]cacaggttggagtgcagtggcacaatctcagctcctgcagcctcgaccccctaggctcaagtgatactcctgcctcggcctccacagtagtaaacttgagtggtttttaaacagatcatacaagcacctggtaaaaaaataaaatgtaagcatgaaagggtaaatagtggaaagacagacgcggctcactcttgatccctgagaactctcatccccaccaaaggtcctcactgcacacagtcttcccatctcactgcacacagtcttcccatctcctccaggggtatttttcacacgcacaattcacacacagaggtctgtgcctatatacccttcctcatgacacagacgaggcagagcccacactttgcctgggaattttctttgcttttttccatgtaataatactgtttggacattgttctgtatctatgcatacacagagtgtctaaagtctggaggctgggcatggtggttcatgcctgtaatcccaacactttgagaggccatggtgggaggatcacttgagcccaggagtttgagaccagcctgggcaacatagcccacacctcatagcaggatctcatctctacaaaaaataccaaaaaaaattttaaaaacgaacaaacaaaacaataacaacaacaaaaaagagtctgaaagcatatggaagatacctaattaatttattgtactttttcag[136 bp omitted]cttgaggccaggagttccagaccagcctggccaatggtgaaaccccatctctactaaaaatacaaaaattagctgggtgtggtggcgcgcacctgtagtcccaactactcgggaggctgaggcaggagaatcgcttgaacccgggaggcagaggttgcagtgagccaagatctcaccactgcactccagcctgggtgaaagagcgagactctgtctcaatcaatcaatcagtcaatctagggaaccatcaccagcacggccgaaggccaaaggaaaacatctgaaacatgttatctggaaatgtaacagacacatcccatcatataaaaccattgttccctgggtatcccctttgcagacagcctgagagcctcctctttttcctggggccatggagtcctcgcgtatgaaggttgcatacatcctcctcccagtgccctcttcagggcctaggtctgcagcctcttgttttgggcacgcctgcaaggacagttgcaagatgcattcccatgtggaattgctgggtggaagacaggtgcactttcagagctgatcacacagctatactgccgtgaagagctgcacccatttatgcgggtgcgggtcacaggctctgggcgtgccacgtctgtgggaaaagcagctcctcaggagaattagtgccttattcctaaagggaggcccagagcaagcaggggccgttgtcaccctcttcctctgcacccctgcacgcatgcaggggagaaggacgagtctggctgcagagagaagtccaggatgccttccaggcaaaggctgccagggagagctggcccctcagttgattaaggtctctcctttctccacccagatagcccggagaccatcggcaggcgagtggctgtgggactcgggtcctgcctcgccatcctcatcctggcaatctgtgggctcaagctccagcgacggtgagctcctgccatcccccaccacctcctctatcccttggcagaggcccgtgtccagttgctccatctcgaagcctccagcctgtggagtccctgaccctcacacatgtgcctttatttctcagttggaagaggacacagagccagcaggggcttcaggagaattccagcggccagagc[131 bp omitted]gtgaaaccctgtctctacaaaaaatattttaaaaattagccgggcgtgatggtccatgcctgtaattccagctactcgggaggctgaggcaggagaatcgcttgaacctgggaggcagaggttgcagtgagccaagattgcgccattgcactccagcctgggtgacatactgagactctgcctcaaaaaaaaaaaaaaaaaaaaaaaaagggtaggcatgaggcagactgtgaagctgagtggggaaacaaggtgaaggaaggggataaaatgtcctctgaggagacctgggctgtcagaggccagggaaggggacgagggttggggaacaggtggttagcacttcatcctcgtctccctcccaggttagaagggcccccctctctgaaggcccccactccctgggatgctacaatccaatgatggaagatggcattagctacaccaccctgcgctttcccgagatgaacataccacgaactgggtactgagggtaccaggagggtgaccctgcaccctgggagggaggcgggaggaaaagctctgtcccgcctgccctctttgtgccaggcccatgccaggcaccctgatacatgctctgcctcattcccactcggcaacaagcctctgggtaagggccagtctccagaagtggacctgctccttcaagtcagcagcacacatgcccagtccgttcttatcacaaagatcaagacctcatgatacacacccacgcctactccctccacgcacatttgcacgagctcctactgtgagctttgggcactggggaggccacaggttttacataaggggctgaggttggggtgctgttgggggctctgggtgttgagagggaggagagttcgtgggagatgcttcatgcgtggtcgtctatctgccctgtctctcagagatgcagagtcctcagagatgcagagacctcccccggactgcgatgacacggtcacttattcagcattgcacaagcgccaagtggtaaggagggtctccccaggtctccccagaggggctgtggaaggctggggacagggcctggcctcagtggtgggtcccacataggaaggagttgggtaggcatccgtggtggcagaggttgggtgttggagacggttgctccggcagagctggccagagccaggcaggtacctccaggtcctggatgccggccacagccagtttcctgacacgaggacacccgcctgggcttttggacccccgggtggaatgaaggagagaatgcggagaaaagcggcggtggaggctggcgacagtggggccaggctaaccaccatgcggttttctcagggcgactatgagaacgtcattccagattttccagaagatgaggggattcattactcagagctgatccagtttggggtcggggagcggcctcaggcacaagaaaatgtggactatgtgatcctcaaacattgacactggatgggctgcagcagaggcactgggggcagcgggggccagggaagtccccgagtttccccagacaccgccacatggcttcctcctgcgcgcatgtgcgcacacacacacacacacgcacacacacacacacacactcactgcggagaaccttgtgcctggctcagagccagtctttttggtgagggtaaccccaaacctccaaaactcctgcccctgttctcttccactctccttgctacccagaaatccatctaaatacctgccctgacatgcacacctccccctgcccccaccacggccactggccatctccacccccagctgcttgtgtccctcctgggatctgctcgtcatcatttttccttcccttctccatctctctggccctctacccctgatctgacatccccactcacgaatattatgcccagtttctgcctctgagggaaagcccagaaaaggacagaaacgaagtagaaaggggcccagtcctggcctggcttctcctttggaagtgaggcattgcacggggagacgtacgtatcagcggccccttgactctggggactccgggtttgagatggacacactggtgtggattaacctgccagggagacagagctcacaataaaaatggctcagatgccacttcaaagaaccagtgaactcttttcagtctgtggagtcagagtggggatgaggagaggggaaagtcttcatggggcctggggggaaggaaatggagtcacagtggtttactgatcaaaccagcagattagagagtctggtgtcttgttaggaaaagcatactggctttgcagacagacaaacatgagaacttgaatcttgattcttcggcttaactagcccggtgatcttggcagggctcgccagcttgcctgagtctcggcttctccatctgtaaagtggagagggaaaggccactgcctaccacgcaggtggcccacgataggaagtgaggcatcgtcttctatatgctggagccacattgagacccagcacagaagccgaaagtcccccagaaaaccaacctccatcctttatttgcatttttcgaagaatgtgaaaaggggaagccgattcaaaacagctcttcccaaaagtgacgctacccaattcttgcacaacccatagctgccagagaaagtcttgaagaccagccaccctgagaaacctcacagcttttctgtcattcgaggtcctctgcacccgttctctaattctgttcactgattcagactttccagttaggtgccccagctcccctctccgcttctcgggtttgatctttctccacccattcacctgcttctgcaaaggggctaaagcccattctccttagagggcaggggtgtaattatctgatcatcagggagattggctcctggcacgtggcaggtgtccccaaactgccaccttcctctcccaccttcctttccctcccatctctgctcagtacccggacggtaactctaggaattatggttcagggaggccttgatcgccccatcaatccactttgtccctggtttgattcttgtgagcaccattaacttttctggaggaaggtgaggctttaagaactgtttaaagcccaggcgtggtggatcacgcctgtaatcacagcactctgggaggccaaggtgggcagatcacctgaggtcaggagttcaagaccagcctagccaacatggtaaaatcctgtctctaccaaaaatacaaaaattagctgagcgtggtgattcacacctgtaatctcagctacttgggaggctgaggcaggagagtcgcttgaacctgggaggcggaggtagcggtgagccgagatcacgccactgcactccagcctatgcaacagagtgagactccgcctcaaaacaacaacaacaaaaactgtttaaatgagacaggagggtgttggggtgtctgtgcccaaaatggggtctggtgtcattcaactctttcttcattcattctgcacacagatactgagcacctggaaatgcacccagtacagagccagttgttaggacaccaaaaagataaggcgtaggaccaaccttggggatctctagtcgagagccgccaagggtttttaaggcaagataccctggagggagctgaggcagtcctaagcctgaagggcctggcttaagctccctggcaaccatcgagcatcttccccttcccaccctgtccctcagcacagctgctgacataaacctactacatggctgattgaccatgagatatggccatcaatagacattgctgaggcgtgaagagcaggtgaagagcaggtggccaggaagctagggggccaggactccagacgcaggccgccctccacaaccccagctctcacagtcctcccagggtccagacaatggatcgtgcatttaggttcccaaacacctgctgtgcaacgtgtagtagacaaagcagaccaaagcctttgccctcaggaggccggcattctagctcaggagccagccaagacgatgtcgcactgaagaaagacaacaaaagtgagattcacaggagggatgagtgtggctgaggcacccgggaaggccctcggagaaggtgaccttgggcaaagatccagacgccaggtgggtggggccaaagcagagaagatctggaaaacccaatggctccccagggcttcgctcttgctgcaggaggggaaaccacactgctgtggattcttcctccattctgtccatttctcagttcccaacaacacactgaacagtaggaggccagttctccgctcacagcgggcgctgcaccccaggtgctgctctcgagaaaaaggcgagcatggaccaatttagtggctccgaggtatgaaaagcagtgagatggtgtctttgagggagttagtgataggctgagacccccttgctgtcccccctgaagcctggtgaccagagctgccaggaggccacacagagagaggtttatgatgggggacctggaattcggaaggggcagagtggtcaggtgacccatacacgcctgagaaaactgatgtggagagctgtgttgtcattctgaggcaggaaatagagacagactgacagacagacagaaagacacgggcacattgagagacagagacagaatcacagagcagagctggcttctcaccagcaggcgtgggcacacctgagagagcatccagagaggttagaaatcttccttaggtcctcctgggaggctcaggtgaccccagtgggaaacatgaaaggctgggaggacttccagggctgagagaaggaagctacgcagccggccggtgccacattccctgtgccttggggagtgtcccccagtgtccccagccatgcaccctggggggagtcggcttggacatctgtgccaccccttgacaggcagagtgggggccacaacctgggccctccagtgctggtcagcagaggctgcccccgccccttgccttcctcctcccgctccttcctccagccctgggaaggtcggaagccaccaccatggggctagtgcggaagcagagggagaacagaggggccctcctcgcaaaaactaaaacaagcccacagcctgtgcagaaccgcacccgggtgtgatcactccttaccccacacacccactgccacttggagatggcttcatggctgcagtcacagggcaccctgtgttgtcaggggtgagccagtgaggcccgggacctgcccaggggtgcatcaagggtggagaagacctggccccagcgcaggtgtgaacaggcaggagggctggggagggaatagcgctgggttgtggccgagcccccaagccctgctcttgagaggcactggctacacactcggcccctacccagacaggaccccaattcctccctggcccctctgtgttcctgcatcttcccagcccctcacctcctctggcgtggcctcacctccagccgggatgccccattagctgctcacccaagctgctagaacctcaggctaatggccctgtcacccgccctcctccccttccggctcactgcccatcccgggcatcctccatcagcccgctgaggggactgctgagcctcagagacatctggcagcaccaggaggtgggtccctctctctgtggctcctctcttcacctgactgttccccagacccccagaccccctgcccaggtggcccctgagaactgctaagctcaaccgtgacatggatggggcctggctgacccttgggctctccctgggggacccccttttcctgtccctggccacaccctcaccttatccacacccttctcctccctgctgccccgccggctttccaatgtgggtggggggtgggggcagctcctgccttgccagggaaccagggagggcagtgggctcaggagtcaaactcccattcccagggaaggctcaggctgtgggcccagccctgttctgaattctctccacccctcctccccacagagtctcagaaatcgagaagctttcttcctctgggacctgtgcgccacatcctatctcctgtgacgctgcaggagcttccctggttttaagaggtgacatggtggagagaaagcacaggactgggggccacaggtcctggcttctcatccaggctccgctgctccctgactgctgcctttctctgtgggcctcgtttcctccctgatcccaccaggtgaattgtaattctccacacagggctggaacccgcgagtgatcccaggagcccctcctctccggggccccaagatctgaggacagggagccaggttgcacacaggagccgtgcaggccaggacggcggccccatggacctgcccccgcagctctccttcggcctctatgtggccgcctttgcgctgggcttcccgctcaacgtcctggccatccgaggcgcgacggcccacgcccggctccgtctcacccctagcctggtctacgccctgaacctgggctgctccgacctgctgctgacagtctctctgcccctgaaggcggtggaggcgctagcctccggggcctggcctctgccggcctcgctgtgccccgtcttcgcggtggcccacttcttcccactctatgccggcgggggcttcctggccgccctgagtgcaggccgctacctgggagcagccttccccttgggctaccaagccttccggaggccgtgctattcctggggggtgtgcgcggccatctgggccctcgtcctgtgtcacctgggtctggtctttgggttggaggctccaggaggctggctggaccacagcaacacctccctgggcatcaacacaccggtcaacggctctccggtctgcctggaggcctgggacccggcctctgccggcccggcccgcttcagcctctctctcctgctcttttttctgcccttggccatcacagccttctgctacgtgggctgcctccgggcactggcccgctccggcctgacgcacaggcggaagctgcgggccgcctgggtggccggcggggccctcctcacgctgctgctctgcgtaggaccctacaacgcctccaacgtggccagcttcctgtaccccaatctaggaggctcctggcggaagctggggctcatcacgggtgcctggagtgtggtgcttaatccgctggtgaccggttacttgggaaggggtcctggcctgaagacagtgtgtgcggcaagaacgcaagggggcaagtcccagaagtaacgccactgctcgggggaaggagcatggggcaggagggcccggctgcttctccaggcccctgcggggggctgcttcggaggaactgcagggcagcctggcccggaggcctccctggagccactcaagcagagagcggcgcctgctgagggcagcaccccagtcaagagaggagcaccgagccagagcacggtggcagggggaggtaagtttgcccctgcacgtgtcgaggaagtttgtcccttcctcgcctatctttctctcccctctgcacgtcctcacctgcctgtcttccgtgggccgcgagcagaggccttgtacttacgggaaggaggaggcagtctgtttctgacccacaggaactgccactccggtgatgcacttgaggacagctactctgaaatcagttcccaggagagaacatttgatttccgagtaggagaggaggcaggaggcaggataatgacgctgttataccatgtgaaactcgcaagggggcagccttggagcttggaacggaggctggcaggaaaagatgcttcagccggggagggaaaatgcaaggtcccgcagtgatgggcaaaggctacggagttgactcttgaacaacgtggggatggggtgccgaaccccacgcagtggaaaatctgtgcatgactttgactcccccaaagttcaactactaatagcctactgttgaccaaaagctttacccagtatataaacaattgagtaagacatatttgaagccaggcacagtggcttatgcctgtaatcccagcactttaggaggccgaggcgggaagactgctcgaagccaggagttcaagagcagcctgggcaagatagtgagacccccacctctacaaataataaaaataaaaataattagctgggcgtggtggtgcgtgcctgtagtcccagctactcaggggtctgaggtgggaggatcccttgagcccaggattgaggctgcaatgccatgatcgcaccactgcactccagcctgggtgacagagcaagatcctgtctctggaaaaaaaagaaaaaagacatattttgtatgttatatatattatgtgctgtattcttacaataaagtaagctagagaaaagtacatgttactgaaaacattattagaaagagaaaataccttcacagcactgtgctgtatttatcaatactgtaagttttgttgtctgtttataagagaagttgtctgtctcaagcggcagtaaccgcggctgcagatctcaatctgtggtagatatcaagcagttcaacccttttttataatgtcatgacttttctttgcttcttggaagcagctctggcatcactagtggccccgcatttggggccaagggggttattcaaagtttacggtattgcattaaacatggtgaaacatatgcaatgactatgaaagatcactttttacttctgtacacagtgtactggcgagaactgctcaccaggaggtgattagcttcacgtggtgttggaagcagatactcaacagttgagctcacggagaaagcacaggaggtggctacgaaattattataggagtacagtatgtctacagtaaatatgcacttatgactttaatactgcacatctttatgtttgcttgcatttctcttgacttcaaatggcatcaaatagagtttgtgtttgcgtgcatatatttttgataaattttaacttttttgttttgttttgtttttagacagagtcttgctctgtctcccaggctggagtgcaatggtgtgatcttggctcactgcaacctccgcctcccaggttcaagcaattctcctgcctcagcctcccaagtggctgggattacaggcacctaccaccacacctggctaattttttgtattgtaagtagagatggggtttcaccatg[131 bp omitted]gggcaacatggagaaaccctgtctttaccaaaaatacaaaaaatttagctgggcatggtggcgtgtgcctgtagtcccaggtacttgggaggctgaggtggaaggatggtttcagcctgggacgcagaggttgcagtgagccgagatcatgtcattgcactccagcctgggtaatagagccagatcctgtctcaaaaaaaaaaaaaaaaaaagctttgtatccattttggcatacatagactagtatgtatggcagtaaatagactagtggcagtaaatagactagtacctacatatattttttgtattcgtggcatacttaacttttgcttaattttaaaaatatatttctaggcttgtagttcctctgtaagttttttcaaattgttgcaaatctctgaaaatgtttccaatgtatttattgaaaaaaatccacaagtaagtggacctgcacagttcaaacctgtgctattcaaaggtcaactatatagtctgtaatacgtgatgggtgtcacgctgagtgtctacagtgagtgttgtctcacttcagcttcacacaacgctgtggtttagccttgccactgccgtacggatgagcgggtgttcactacacgaaggtactgggcagaggagcaaacactgactaaattctagcctgtgctttgctcaacaagccacatgcctgccttgcttgcatcaagggaaggagtattgtgttctaatttgaagaaatacaccagccactccttaggcagcacttggtgcgggatgggctcctctggaaagggagcacctaatttgcacaaaggtgctgcaccaggtagctacgatcctggaatgggatgaagaaacttgcctaaggccctacagcaaggaaggggtaaaagcaggatgtgatccttccaagcagaacccccaagagccaggggacatttgggaaacctgggggtgtgggggttaaccctgtatttgtggtccatttcgcaaaggatagcatcccacatccatgagagggaggtcagaagggagtggctgtggctgtgaaggagacagacacctgggcacctgctctaaattacagcaatgccatgcacatgatgatgtattggagcacaacaaatggcagccaccagctggggtgcacgcaccaatttctacaaatgagctctgttcaggctgaaatgtctacgcatgcaaggatttttcttgtaattgatgatatatccccagcgcccagaagacagagtggcacgcagtaggtgctcagtaaatgttcgctcaatgaatgaatgaatgcctctactagccttccaaagaaagttctatgtctgttttatcaatatggaaacaggccagagaaattaagtaacttcttttggaagccagaaacaagcccggcacttgtgcagtgacaacaccagggaatttcagtaaaaacccaaactccaccccagggagccccagtgcctcctcccgcatcacagggtgccagggcccactctctttgactcctgctccatagcccctgctgggtactgggctgcttctcccagttcctcctgcctccccccacttagggcaaatccagtgcctccctggggcccaggagactcagtgtgatccaccccaggcgcctctcactcctgtgagacccaaacctcctatcagctcccccagcaggccaagtctgtgcacccgtgactcccctgccccaatgttccctccagtggctctttgcctcttcagtatccacgtcttcatgatccttcccctactccatcccccaagccctcaccaccaaatgtaatgtaaacagcatgacagcaaaaactttttgttcacaactgcgtgttgttttttttttttttttttttttttagacacagtctcactctgttgctcaggatggagtgcagtgacacagtcatggctcactgcagccttgaattcctgggctcaagcgattcttccatttcagcttcccaagtagctgggaccagaggcacatgccactaaacccagctaatttcttttttctttctctcttttttttttttttttcccctgtggacatagggtctcctcatgttgcccaggctagtctcaaacaacctgtgctcaagcaatcctcccacctcagcctgccaaagtgctaaaattacggacctgagccaccgtacccagcctactgctgcacttttaacagcttaattgagatattatgtacatatcatcaaattcaccaatgttaagtgtacaattcaatgatttttagtaaatttactgaggtgtgagtccattaccatcagctagttttagaacattttcatgaccctagtaaaggattttacttcatgttcatttaaacttaatcttgggccaggcggggtggctcacgcctataatctcagcattttgggaggctggggtggacggatcacctgaggtcagtagttcgagaccagcctggccaacatggcgaaacctcatctctactaaacatacaaaaattagccaggcgtggtggcgggcacctgtaatcctagctacttaggaagctgaggcatgagaatttcttgaacccgggaggcagagtttgcagtgagccaagattgcaccattgcactccagcctgggcgacaacaagaccctgtctcaaaaaaaaaaaaaaaaaaaaaaaaacaacttaatcttcatttctacctccatcccccagacaaccacgagtctactttctgactctataactttgcctattctggacatatcatataaataaatgaaatctgacaatatatgtacatggtcttttacgtctggcttgtttcactcaacataaggctgtagtgtgtatgggtagctcattccttttctttgccaaatagaattccagtatatggatgtgccacttttttattcactcaccagctgatgggctgccaggtaacatttccactgttggtgactatgaccaacactgctgtgaacatttaggactgagtctttaagtagacctgagtttccacttctcttaagtaaatacctacggtggaattgttggatcgcatggtgaatttatgtttaactttttaagcaactgccacctgctttccaaagcagggacaccacctcccattattctcaccagcagtgaatgaggcccctatctctctacattctcgccgaccataggcattgtctgactttttgcttgtggccattctagtggatgtgaaatcatatctcattgtgccctgtgattgtttgaatgaactaatagatcacctgtgaaactggacagcacttgggtttgaaccctagtggtgacatttcacaagctgtatcacctggagcaagtcacttccctacggtgaaggacaaggattttatgacataaaagcgttgccctagaagcagtgtctgctatggattatgtgcccatgaaaaggcagctgctgtcatcatcgccaccaccattattattgttattattattacattgtcaccccagagataatcctgcaccagtgacagggaaaatagcagctggcatccgctgcctgctcacgaccacacgccaggcttccgtcaaaccactcaacatgtattagtaatcttttaatcgacctacatattgttttaatttgcatgtgttaatgcgttgatctatgagatgggtattatgatgagctctgttctgcaggggagaaagcagaaacatggagaatttaagtcatttcccccaaatcacaaagtcaggaagaaacagacctcacggagctcgctctctgtcattgcatcacacttcctgcccttacaaggcaaattggataaatgccattctagagaagcagacaaaattcaagtgaagaaggggagaggaagacgtcggctggggcctgcttagagcatcccagctgagactgcatgaggagggaggcacgcagttgtggaatttgttccccttttagcatgctgaccagccctggcaacggagctcaaggcatctatgtgccactgctcaacagtgagtgacgtcatgggcacggccaggtctttatcagttctgccggataaatagccaactgcactaggtctggagagacagcaaggtgctgtgcggcagagcatttggggtctcaaagaagcaggtgagcctgggcccgaggggctgggtggaggagcaccttggtgcttctctgctggggaagggacaggggacagggcatgctcaggaagacaggcaggctgaccccgcctggaaggcacccagagacaagaggggtgggcgtagtgacctcgtgcccttttaggggagatgctgctggccagaggccgttagggcccccactaccaactccatgttactctctctcaccagtggccaccaccatggatacaggccccgaccagtcctacttctccggcaatcactggttcgtcttctcggtgtaccttctcactttcctggtggggctccccctcaacctgctggccctggtggtcttcgtgggcaagctgcagcgccgcccggtggccgtggacgtgctcctgctcaacctgaccgcctcggacctgctcctgctgctgttcctgcctttccgcatggtggaggcagccaatggcatgcactggcccctgcccttcatcctctgcccactctctggattcatcttcttcaccaccatctatctcaccgccctcttcctggcagctgtgagcattgaacgcttcctgagtgtggcccacccactgtggtacaagacccggccgaggctggggcaggcaggtctggtgagtgtggcctgctggctgttggcctctgctcactgcagcgtggtctacgtcatagaattctcaggggacatctcccacagccagggcaccaatgggacctgctacctggagttccggaaggaccagctagccatcctcctgcccgtgcggctggagatggctgtggtcctctttgtggtcccgctgatcatcaccagctactgctacagccgcctggtgtggatcctcggcagagggggcagccaccgccggcagaggagggtggcggggctgttggcggccacgctgctcaacttccttgtctgctttgggccctacaacgtgtcccatgtcgtgggctatatctgcggtgaaagcccggcgtggaggatctacgtgacgcttctcagcaccctgaactcctgtgtcgacccctttgtctactacttctcctcctccgggttccaagccgactttcatgagctgctgaggaggttgtgtgggctctggggccagtggcagcaggagagcagcatggagctgaaggagcagaagggaggggaggagcagagagcggaccgaccagctgaaagaaagaccagtgaacactcacagggctgtggaactggtggccaggtggcctgtgctgaaagctaggtcctccgggggaggagggtgtagctggcatgtcatcctcagggcgcttcctcgctcacgccaggagggacttggagtggcgagctggggcccgatggggcttgggggcagagtagacatctagcctccctaagggtatgcgcgctaaagcccagctctcgatctcacctccatccccatccacccacacactatggattgggctctgggaaggggtcagggtgagaggctgctctggagaacaatgaggtcctcatagcagcaggcagctcctgtgttttcttgagggtggcagaggagctaagagcagtgcccagggtctgagggggctgcccagtgagtggcaggggcaggagaggggagaaccccatcctcagagctgctcccagccagcgagtcaggagcgggggagacagggctccagggatgaggccgcattctgctcccacagcgccttttccagaaagttcccattgctcaataaatgtggatcatcagagacatttatgaacaatgacagaagaaaaattacccaaataaatgtggaagcaagcaaaagagaacagtgtttccttcttctcctgttttgttctggtggtgtgcttgggccgggtgggactggtggatggaaggagaaaacaccagactctggaggaaaagggccaaacaccaggatgcctggatgctgggagaggatctggcttgcagggatgaaaataacagctgccctgtctaaaggacttggcctgacacatcatctccttctatctctcaatagccctgtgagaggtaccagcattatccccagtttcagatgaaggagtggcccagagaggtgacacctcctacctgagatcccatagctggtgggcgattgaagtgggaccagaagctggtgtcagttgactctgacacccatgcccctaagccactctgctgttctccatctgtgtgtcacctgtggtcacctggcccagtcaaatgtcccaagtcagataagtctgtctgagcaggacaaatataaacaggccatgataagaaacagaactaaatgcaaagcgtattgactatttgtgtgggttcaaccttttcccagtaaaaaagccctcttggaaaaaaagaaaaaaagataattagtcagcacaatggacttcaggtttctgcaaagtcagagagatgttcctcagagctctattcatcaaaatatggccattcaggaagttttcatgttccctgagtggtggcccatgagaaatagctggtcaggacctcctccccaagcaaggccacctgagactcgccagcccctgtttgcatgctgtcagcagtatttcagaagcatttgttgaacacctattgcatgcagatggctgggctcagaacttcggggagttcgacactaaggtctttaaatatctgcttcctccctggggttaagtgtgccgggagaatgaagactggctgtgtgtggggaagtggatttcaggtggaaggagagggactctgtggagagttgaaaccatgagctgtctctctgtcccacggctcacctgtccatccccagggcactcagccctggtggctgcaaagaagttgatgcaggtaggggtgttcatggctcagaaaggggacaaaggtgccatggaatcctgcaacttcagaatgggcaccgccaccccaaggcagagaacagaaaaactgaaaacctcacagtcgaaagagagccatgaagagctggagtctccctcctcccccaggtttataagagggaataagaggcagcttcatgggctttgctgtccccagctatctcccagcccagcccagtctgtataagcaaaagcccaggggtggggaagatgaaaagccatcagggtgtgggtgatcgtgggagtgggggtgaggaggatgttggagcattttccatacatctcagaagcccagggaacggggctgtcatagaacgggagatgcatctggggctgccgcttggtgccatctaggtggggtgggagaaaggcagagagaggaggtgggagaagactgtggggggtgcagcagctggcaccctctccatcgggcagagcaagtaggtgtgaatctcccatgggtgaagcgatcacacgcaaaaaggagggagatggcatctttggagggaggtggtgataggctgagaccccctcgttgtcccccccgaaacctggtgaccggagctgccaggaggccacacagagagaggctgatgatgggggacctggaacctggaaggggcagagtggtcagatgacccacacacgcctgagaaaacagatgtggagaggctgtgttgtcattctgaggcaggaaacagagacagacagacagacagacagacaccggcacagtgagagacagagacagattcacagagcagagctggcttctcactggcaggcatgggcacacctgagagagcatccagagaggttagaaatcttccttaggtcctcctgggaggctcaagtggccccaccggggagctgaacagctggctggatttccagggttgagagaaggaagctgcgcagccggccagggccacatcccctgtgcctcagggagggacccccagtgtccccaccacactccccaggaggagtccttggagttgaggccactgcctgagtcctccagtgccagccagcggaggttgctcccgtcccttgtcttcctcctccccatccttctgccagccctggaaaggtcagaaaccaccattgcggagctagaggggaaggagaggcagaacagaggggcctctcctcgcaaaaactaaaataagcccacagcctgtgcagaaccgcacccgggtgtgatcactccttaccccacacacccactgccacttggagatggtttcacggctgcagtcacagggcaccctgtgttgtcaggggtgagccagcaaggcccggggcctgcccaggggtacattgagggtggagaagacctggccccagtgcaggtgtgaacaggcaggagggctggggagggaatagcgctgggttgtggccgagcccccaagccctgctcttgagaggcactggctacacactcggcccctacccagacaggacgctgattcctccctggcccttctgtgttcctgcatcttccaagaccctcacctcctccagtgccgcatcagctccagccaggatgccccatcagcttctcacccaagctgctagaacctcaggctaatagccctgtcattccagctcactccccccgtccccttctggctcactgcccatcctgggcatcctccatcagcccgctgaggggactgctgagcctcagggacatctggcagcaccaggaggtgggtccctctctctgtggctcctctcttcacctgactgttccccagacccccagaccacccctgcccaggtggcccctgagaactgctaagctcaaccgtgacatggatggggcccagctgacccttgggctctccctgggggacccccttttcctgtccctggcgacaccctcaccttattcacacccgtctcctccctgctgccccgccggctttccactgtgggtgtcggggggtcagctcctgccttgccagggaaccagggaaggcagtgggctcaggagtcaaactcccattcctagagaagactcaggcagtgggcccagccctgttctgaattctctccacccctcctccccacagagtctcagaaatcaagaagctttcttcctctgggacccacgcgtgaagtcctatctcctgtgaccctgcaggtgctcccctcattttaagagatgatgtggagagaaagcacaggactgggggccacagcttctcatccaggctccgctgctccctggctgctgcattcctctgtgggcctccgtttcctcggtgatcccaccaggcgaattgtaatcctccaggcagggctggaacccatgagtgatcccaggagcccctcctctctggggcctcaagatctgaggacggtgagccagttgtacacaggagccgtgcaggccaggacggtggccccatggacctgcccccgcagctctccttagccctctatgggaccacctggcttgtttcacttagcgtaatattttaaagattcactcgtgatatagtacagcagtccccaaactttttggcaccagggactggttttgtggaaaactatttttccatagacctcaggggagtggggggatggttttgggatgaaactgttccacctcagattgtcagacattatttagattgccataaggagcgcgcaacctagatccctcgcatgtgcggttcacaatagggtttgcgctcctgtgggaatctaatgctgccgctgatctgacaggagctcaggcggtcatgccagcttgtctgcccactgctcacctcctgctgtgtggctgggttcctaacagaccactcacctgcacgggtctgcagcccggggttggggagctctgacgcagtaggtataggcagctcattcctttttattgccaaatagaattccagtgtatggatgtgccactatttttatccactaactagcagaagggcctccaggtgaggtttccacttttagttctttttctttttctttcttttcttcttcttttttttttttatactttaagttctgggatacatgtgcagaacatgcaggtttgctacataggtatacatgtgccatggtggtttgctgcacccatcaacccgtcatctaggttttaagccccacacgcattaggtatttgtactaatgctacccctccccttgccgcccatgccccgacaggctgcggtgtgtgatgttctcctccttgtgtccatgtgttctcattgttcagctcctgcttatgagtgagaacatgcagtgtttggttttctgttcctgtgttagtttgctgagaattacttttggttcttatgatgtatgctgctacaaacattgaggactgagtctttgcttagacaaatgttttcacttattttaaataaatacctatggtggaattattggatcacatgttaaattgatgtttaactttttaagaaactgccacctgctttgcaaagcagctgtaccatctgacattctcagcagcaatgagaggcccctgtttctccacatcctcaccatcacttgttattgtctgccttttgcttatagccattctagtggatgtgaaatggcatcattgtgctccgtaagtatttgaatgaagaaataaattacctctgcactggagagcacttgggtttgaacccgggtggtgatatttaataagctgtatcacctggagcaagtcacttccccactgtgaggcacaaaggatttcatgacaataggggatgccttgagaagtggagtatctctggatctgtggattatatgcctaccgaaaagcagttgttatcatcaccaccgccaccattattattattactgtcaccccagagacatgcccacacctgtgacctggatgctggcagctgacaggtgctgaacacacaccatcacatgccaggcctccttcaaagtacttgacacagctcttatatgggatttcacaaagggcggcacccaactctccctcactacaggagcagcagggtctcagcaatgtaggacagttcacagagttgcatgctctggacttggggtagagactctgccatgatgcctatcttaattgtagctggcagagaggcggatctacagtccacaacagcactttggctgggaaccaaaggatgaagactttataaccagaaggtcatgtgccatgtaacaggggtgtagggaagtagatcatgcttctgttggcttaggacaaggagctggtgcaccccttacccctttctgtgtcacttcagagcaccccatcacgatctcttcctgccactcctgtcaaggaaggtgtgaccactgggccctggcctacctgccagctcttcttaagtgccatctactagacttcagcttaaattgcaccacgaaacaaaaatatattgctacaacatgcggcatctgagaaagcaaccgcatgaacctatctgcaaccaagaacttgtacagagccttggccctccgaaagcatccagaaatgaagccagttgatcatacacaacacacaccatagtcataccttcaacagaaaaaaagaataaaaaaattaaaaagccccacccaaatgaaagcaaattttgaaaaagaagcatcagccctctcagatgagaaggaatcagcacaggactctggcagtacaaaaagccagaatgttttgtcacctccaaaggatctcactagctccctagaaatgtatcctgaccaaattgaaatgctgaaaatgacagatctagaattcagaatgtgagtggcaaggaaactcagcaagacccaagagaaagttgaaatgcaatactaagaagccgtaaaaatgagccaggatgtgaaagatatatatatagggggggaaaaaaactatatatagagagaaagaaccaaaacacaaaaagaatcaagcagaacttctggaattgaaaaatttactacaggaatttcaaaatactgttggacacctcaacaatagactagaccaagtagaagaatttcagaggcagaatgaattttttaaattaacctagtcacacaaaaataaagaaaaataattttaagaaatgaacaaaggctttgagaagtataggattatgggaaatgaccaaactatgacccactggcattcctgacagagaagaagaaaaaataagcaacttggaaaatgcattttaacgtataattcaggaaaatgtccctaatcttgctaaagaggtcaacatgcagatataagaaattcagggactgcctgagaggtactatacaaaatgaccatccccaaggcacatagtcatgagactgcatgaaagaaaaatatctttaaggaagctagaaaaaagagccaaattacctataaaggaagtccactcagaataacagtggatttcttagcagaagtcttacaatttagaagagattgggtgcctatttttggcttcttttttttgatggagtcttactctgttgcccaggctggagtgcagtggtgcgatcttggctcatggcaaactctgcctcccgggttcatgcaattctcctgcctcagcctcccaagtagctgggattacaggcatgtgccaccatgcccggctaatttttttgtatttttagtagagacggggtttcaccatattggccaggctggtctcaaactcctgaccttgtgatccacccacctcagcctcccaaagtactgggattacaggtgtgagccaccacgcccagccttctaggcttcttaaagaaaaaatgccagccaagaatttcatatcctaccaaactaagtgtcacaaaggagaaataaaatctttcctagacaatcaaatggtaagagaattcatcaccaccagactggtccaacaagaaatgctcaaagaagctgtaagcatgaaaacaaaagaatgatacttgctaccacaaaagcacacataagtacaaagcccacagaccctataaagcaactacccaaccaagactacaaagtaattaactaacaacacgaagataaatcacaacagggacaaaacctcacatattaaccttgaatgtaaatggcctatacactccacttaaaagacatagtgtggaaaattggataaaaatatgagacccaaccttctgctgtcttaaagagacccatctcacatataatgatacccaaaccctcaaagggttggagaaagatctctcatgcaaatggaaaacaaagggttgctattgttgtatgagataaaacagactttaaaccaacaacagtaaaaaagcacaaataagggcacttcctaatgataaagggttcgattaaacaagaagatttaacatcctatatatataaacacccaacgctggagtacctagatttataaaacaattactacgatacctaagaaaagagatggacagccacacaataatagtggggttcttcaacagcccattgacagcattagacagatcattgaggcagaaaactaacaaagaaattctggacttaaattggacacatgatcaaatggacctaatagacatctacagaatactctacccaacaaccacaaaatatacgttcttctcatctgcacacagaagatactctaagattgacccaatgcttagtcatgaagcaaatctccataaatttaaagaaatgaaaattataccaaccttcttctcagaccacagtggaataaaaatagaattctcaaaatcacacaaatacatggaaactaaacaactatttcctgaatgactttggggtaagtcattaaggaagaagtcaaaaaattaaggcagaagtcaaaaacttctttgaaacaactgaaaatagaggcacaacataccaaaacctctgggatacagcaaaagcagttttaagaggaaattttatatcactaaatgcctacatcaagaagttagaaagatctcaaattaataacctaacattacacctgaaggaactagaaaaacaagagcaaactaaatccaaagctagcagaagaaaagaaataactaaaatcagagtagagctaaacgaaattgtgacaaataagccattcaaaggatcaatgaaatgaaaaattggttctttgaaagaataaacaagatttataggctgcaagctagattaacaaaggaaaaaaaaaaacctccaaaaaagcacaatcagaaataacacagacaagattacaactaattccacagaaatacaaaagatcctcagagactgcgatgaacatctatattcacatgaatcagaaaatctagaggaaacaaataaatttctggaaacatacaaccaagattgaaccagaaagaaattgaaactctgagcagaccaataatgagttacaaaattgaatcagtaataaaatatctaccacctttaaaaagcccttgaccagatggattcacagccaaactctaccagacctgcaaagaagagatggtaccaatcctactgaaactttaccagaaaattgaggaggagagattccctactcattctacaaaaacagtctgattctgatatcgtaatctggcaggacacagtgaaaaaagaaaactgtaggccaatagcccgatgaacatagatccaaaaatcctcaataaaatactagcaaaccaaatccagcagcatgacaaaatcataattcagcatgatcaagtgggctttattcctgggatgcaaagatgtttcaatatatgcaaatcaataaatgtgactcaccacataaaattaaaaacaaaaattatatgatcatctcaatagatgcagaaaaaaacatataataaaatccaacatcccttcatgataaaaaccctcaaaaaactaaacatcgaaggaacacacctcaaaataataagagccatccaggacaaactcacagccaacatcatactgaatgggcaaacgttggaagcattccccctaagaaatggaaaaagacagggatgcctactcccactactcctattcaacatagtagtggaagtcctagccagagcaatcaggcaagaaaaaggaataaaaggcatccaaatagaaaggggaagtcaaattatctctgttcactgatgatatgattctatacctagaaaaccctacagattcctccaaaatactcctagacctgataaatgactggcagtttcaggatgcaaaatcagtgtataaaaatcagtagcattactatataccaacaattgtcaagctgtgagccaaataaagaacagaatcccaattacaatagccacacacaaaaataaaatacctaggaatacatctaaccaaggaagtgaaagtgaaagatctctacaaggagaactaaaaaacacaaataaatgaaaaacattccatgttcatggattagaagaatcaatatcattaaaatgtccatactgctcaaagcaatctacagattccacccaattcctaccaaattatcaatgtcatttttcataaaatggaatcattctaccaaaaagacacctgcatgtgtatgtttgtcacagcactattcacaatggcaaagtgatggaatcaacttaggtgcccatcaatggtggactagataaagaaaaaatggtacatacacatcacgaaatactatgcagctataaaaaagaatgaaatcatgtcctttgctgcaacataaatgcagctggaggcctaagtgaatgatcctaagtgaattaacacagaaacagaaaatcaaatgctgtatgttctcacttttaagtgggaggtaaacaatgggtacacgcaaacattaaagatggaaaccatagacagtggggactccaaagtgggggagggagggcggaggacaagggtgggaaaactgcctattgggtactatgttcacaattttggtaatgggttcaatagaagcccaaacctcagtattatgcaatatacccatgtaacaaacctgcacatgtgctcccgaatctaaaataaatattttcaaaaagcaattgacctatattattaacattttaatctacctgtatatatgttttaatctgcatgtgttcatgctttgaaatatggtacaggtactatgacaatccctgttctgtaggggaggaagaagagacacatctcttcccccacatcacaaagtcaggaaggaacagacctcacggagtccagtctgtcactggctcatgctttgtgcccttaaaaggcaaactggataagtgccattctagagaatcagacaaaattcaagtggaagagaggggaggggaagaagacgtcagctggggcctgtttggagcatcccagctgaggctgcgcaaggagggaggcacgcagttgtggaatttgttcccctttttgcatactgaccagccctggcaacggagctcaaggcatctttgtgccactgctcaacagtgagtgatgtcatgggcacggccaggtctttatcagttctgccggataaatagccaactgcactaggtctggagagacagcaaggtgctgtgcggcagagcatttggggtctcaaagaagcaggtgagcctgggcccgaggggctgggtggaggagcaccttggtgcttctctgctggggaagggacaggggacagggcatgctcaggaagacaggcaggctgaccccgcctggaaggcacccagagacaagaggggtgggcgtagtgacctcgtgcccttttaggggagatgctgctggccagaggccgttagggcccccactaccaactccatgttactctctctcaccagtggccaccaccatggatacaggccccgaccagtcctacttctccggcaatcactggttcgtcttctcggtgtaccttctcactttcctggtggggctccccctcaacctgctggccctggtggtcttcgtgggcaagctgcggtgccgcccggtggccgtggacgtgctcctgctcaacctgaccgcctcggacctgctcctgctgctgttcctgcctttccgcatggtggaggcagccaatggcatgcactggcccctgcccttcatcctctgcccactctctggattcatcttcttcaccaccatctatctcaccgccctcttcctggcagctgtgagcattgaacgcttcctgagtgtggcccacccactgtggtacaagacccggccgaggctggggcaggcaggtctggtgagtgtggcctgctggctgttggcctctgctcactgcagcgtggtctacgtcatagaattctcaggggacatctcccacagccagggcaccaatgggacctgctacctggagttctggaaggaccagctagccatcctcctgcccgtgcggctggagatggctgtggtcctctttgtggtcccgctgatcatcaccagctactgctacagccgcctggtgtggatcctcggcagagggggcagccaccgccggcagaggagggtggcggggctggtggcggccacgctgctcaacttccttgtctgctttgggccctacaacgtgtcccatgtcgtgggctatatctgcggtgaaagcccggtgtggaggatctacgtgacgcttctcagcaccctgaactcctgtgtcgacccctttgtctactacttctcctcctccgggttccaagccgactttcatgagctgctgaggaggttgtgtgggctctggggccagtggcagcaggagagcagcatggagctgaaggagcagaagggaggggaggagcagagagcggaccgaccagctgaaagaaagaccagtgaacactcacagggctgtggaactggtggccaggtggcctgtgctgaaaactaggtcctccgggggaggagggtgtagctggcgtgtcatcctcagggcgcttcctcgctcacgccaggagggacttggagtggcgagctggggcccgatggggcttgggggcagagtagacatctagcctccctaagggtatgcgcgctaaagcccagctctcgatctcacctccatccccatccacccacacactatggattgggctctgggaaggggtcagggtgagaggctgctctggagaacaatgaggtcctcatagcagcaggcagctcctgtgttttcttgagggtggcagaggagctaagagcagtgcccaggtctgagggggctgcccagtgagtggcaggggcaggagaggggagaaccccatcctcagagctgctcccagccagcgagtcaggagcgggggagacagggctccagggatgaggccgcattctgctcccacagtgccttttccagaaagttcccattgctcaataaatgtggatcatcagagacatttatgaacaatgacagaagaaaaattacccaaataaatgtggaagcaagcaaaagagaacagtgtttccttcttctcctgttttgttctggtggtgtgcttgggccgggtgggactggtggatggaaggagaaaacaccagactctggaggaaaagggccaaacaccaggatgcctggatgctgggagaggatctggcttgcagggatgaaaataacagctgccctgtctaaaggacttggcctgacacatcatctccttctatctctcaatagccctgtgagaggtaccagcattatccccagtttcagatgaaggagtggcccagagaggtgacatctcctacccgagatcccatagctggtgggcgattgaagtgggaccagaagctggtgtcagttgactctgacacccatgcccctaagccactctgctgttctccatctgtgtgtcacctgtggtcacctggcccagtcagatgaggctgtctgagcaggacaaatgcaaacaggctgtgataaggaacagaagtaaatgcaaagcacagtgagtatctgtgtgagtgcatcctctccccagtaaagaagacttcttgaaaagtatagattacgatacttggagtcaatgattgggcaggtgactcacagtgggcacccgatgctcctcgatcttagctaatgcaggatctcttcaactttttacatccttgtccccttcagaagcctctttggatatacatctttcctacacagcacattcctctgcctgcttatgcaatttcagtgcaaccaacacactgtcggtttatgtgttgtggccctttacaaagacagaaactggctgggcgcagtggctcatgcctataatcccagcactttgggatgccgaggcaagagaatcacttgaggtcaggagtttgagaccagcctggccaacatggtgaaactttgtctctactaaaagtacaaatattagccgcatatggcagcatgcacctgtaaacccagcttcttgggaggctgaggcaggacaatcacttgaggccaggaggcagaggttgcagtgagccgagattacaccactgcactccagcctgggtgacagagtgagactctgtctcaaaaaacagaaggaaggaaggaaggaaggaaggaaggaaggaaggaaggaaggaaggaaggaaggaaggaaggaaaagaaagaaggaaggaaagagagaaagaaagaaagagagaaagaaggaaagaaagagagagagagaaagaaagaaagaaggaaggaaagaaagaaagagagaaagaaagagagaaagaaggaaagagagagagagagaaagaaagaaggaaggaaagaaagaaagaaggaaagagagagaaagaaagaaagagagaaagaaggaaagaaagagagagaaagaaagaaagaaagaaaagaaggaaaagaaagccacaaaccattgtgagattttttgttgttgttgttccccaagaactagttttcacctatttgggatcaacattgctgctgctgagaatgtctgagctgcagaaatggtcccatctaatatactgatagagcctgtctcacagaactgtagcccaacaaaattaggctgaggaccttgctgcaggaatggagatcacactacggaagaagtgtgaggtctcgtacaagagaagagacccagttatcatcgaatttgagctaagagtagcgtgaatttagatgaagaggtgtgtgataggctcaacacaaagcagggatgtgtggaaagaggccagtgttagatggaggccaggaagattactcaaggtcctgtttctctggaaaataccaagcaaagataaaggtagaacttcgtattggaaaactccttatctgaagctctggtgggttgaaaatcaaggttgcatctctgtgtcagagactctgatcctctaagcagaagtatatgttcctttcttactcatgatctcatgcagctaagtttctgactatctttgacttttgagaacaaggtttcttagcaatatccttttgttaattagcaaaacaagtttttaaaggtttacaagagaaacttttttagaaggagagatcctccttcaccgaaaccaagggcaggtcaacccagaaggacaagaggaagggaagattcaacccatctcggctacagcttcctgaggccataggtcaagtctcagcttacaggggagtgagaggaaacaagaaattttaaatcacccagtgttggttgggtgcgatgactcacgcctgtaatctcagtgccttgagaggctgaagtgggaggactgcttgaagcaagactccgtaatctaagaaaaaaagttagtcgggcatagtggcatgtgcccatagtcccagctgctcatgaggctgaggcaggaagatcgcttgaacccaggaggtcgaggctacagtgagccgtgattgtaccactgcactccagcctgggtaacagagcaagaccctgaaaaaaaaaaaaaaaggaaagaagaaaggaagaaagaaagagagaaagaaagaaaaggaaagaaggaaagaaagaaagaaagaaagaaagaaagaaagaaagaaagaaagaaagaaagagaaagaaagaaagaggaaagaaaggaaaggaaaggaagaaaagaaaagaaaagaaatgagtaaatcaccaagagtgcgggaagatcgcttgagcccaggaggaggtcgaggctacagtgagccgtgattgtaccactgcactccagcctgggtaacagagcaagaccctgaaagaaaaaaaagaaaaaggaaagagaggaaagaaaaaagaaagaaaggaaggaaggaaggaagggaaagagagagaaagaaagagagaaagaaaggaaaagaaaagaaagaaatgtataaatcaccaagcgtgaccagaaacctttggaagccacctaagaaactgacaaagatggttcaatccatcccatggaaggcagtgagaccattgcaggcttgagcccagtacgctcagactactcagtaaaccagtggcagtggcagacaggagagagagcaggaattccccactgggagacaggatgccagtgcctttttatgagttaaacatgtatccactagagagtgcagtaagtggcctctcaggctgtgcatatgcctggtggggcatgggaagctgtgctgcaagacaggatccgtcagccggcttcaactgggttcagctgggagggggcagacatagacctggtcagggccggcggaggtggaagggaggtaggaggctggacttgactttggaggtggggctcagacactggaccaaattgaggactagctaaaacagggaaacaaggacggagcttaagcgacttcccataggacatgcccaccagtgtcccctgtcagtttaccatggtcatagcaacagctggtaattaccaccctttttctaaaactttgggcattaaccgccccttaatctgcatgtaatgaaaaatagatataaatatgaatgcaaaactgccctaagcggctactcttagcacattgctatggggtagccctgctctgcaggggcagtcacagagctgttgcactgccagaactataccaccatcactttaataaaaccactttcttctaccactggctagcctttaaattctttcctgggtgagctgggtgcagtggctcacacctgtaatcccagcactttgggaggctgaggcaggcagatcatttgtgatcaggagttcgagaccagcctgggcaacttggtgaaacccagtccctactaaaaaatacaaaatttagccaggcgtagtggcccgcacgtgtaatcccagctactcaggaggctgaggcaggataattgcttgaacccaggaggcggaggttgtagtgagctaaaattacaccactgcgctccagtctgggtgacagagtgacacaccatctcaaaaaaaaaataaaaatttaaaaattaaataaataaattctgggttctgggcaaagccaagaaccttcccaggctaaacccctatttagggctcatctgccctacatcagaagggaaacaaagaccagacaaggagagcaagaagcctgggagtctacaaaataagttgcgggactcttccaaaaaaatgaagctgagcatcgataaaagctcaaagacacctggaagaaaagtgagaccaccgtttctgggaattacaagtaggagacagaggtttttattgggggagaatagtgtgagaaggtgctcaacttttgaccttcctctctgaggacatgactcttctggtttagaaaacaacagtaaaaagtccccaagagatactggtggttgtggttcccaaaacttcattaacatctgtgggaagccttctgactttcctctgaggccagttctgaaaagccattcatatggaggcaaatcaaaatatcaaagcagcagcctgtgttctgggaaaatgttgctgggatcacattccagagaaaagatgggatagaaggaatgaaagctgatcaacatggctgggtgcggtggctcacacctgtaatcccagcactttgggaggctgaggcaggcagatcacctgaggtcagaagctcaagaccagcctggccagcatggtgaaaccccgtctctactaaaaatacaaaaattagccgggcatggtggcgtgtgcctgtaatcccagctactcaggaggctgaggcaggagaatcgcttgaacctggtaagcagaggttgtgaggttgcaaagttacagtgagctgagattgcagcactgctctccagcctgggcaacaagagagaaaactccatctcaaaaaaaaaaaaaaaaaaaaaagaagaagaagaagaagaaagctgatcaacactggtagaagtggggaagggcagagctcacctcccatgggagccagggtggagctagcagagagaaaatgttgtgaaagaggaaatgggatacggaaatattttttgaggagagggtgcttttaatggatttagaagaatatagtggctggatatggtggctcatgcccataatgccagcactttgggagtctgaggcaggtggatagcttgagcccaggagttccagaccagcctgggcaacatggctaaaccctgtctctactaaaaatacaaaaattagaggagtatgttggtgcatacctgtagtcccagctacttggggggctgaggtaggaggatcacctgaactttgggaggtcgaggctgcagtgagccatgatcaggccactgcactccagcctgagtgataaagtgagacactttctcaaagaaaattaaaattaaaattaaaattaaaagaagagtatagtgagataacccaatcaatcatcccctgttgcagatcccccagtctcaagggtcaaattgtgattggcactaatcatgatgctgttgaccgcctttactggtgactggtcctaagatggaagtgtgacccaattccagccaacaaagggaaataagtctgctgggggcctctgggaaagatttttctctatctcattaaaaaaatagatgtgtaaggagctgcgctcctacttctaatctggaactttctatggaaggatgtgatacttggagctacagcagccatattggggccatgaggttacaaacttgaggaagaaagcaaacaagctaaggacagcagagcagcaggatgtaaagggcctgcgtccttgaccctgttgaggtgggaccaccaacctccaaagtcactgtagtaaatgttccttttgttgactcactattggccagataccctctaacttgcagcttaacataatagatcagcttatatcctactagaacctacccattgacatcttctctcacgttaaaatattttaggttcctggagtttctaaactctgcctatttgccttataggagctatgtgatgttagcatttgccttatttgttacagctgaactcaggagatgtcttacagttctagacactagctctagcaccaagatgtctggactctcctcattcagaagaaggcttttgagagctgactggctggggctgcatgaacattgctttccaagacaaaaaaacacacgtgctagatgggacctttttaaggtaaaatgttcatctgactgacaatcttaattgcaagcctgcacttttattaataaaaattctcatacttgagcagatcacctgaggtcaggagatcgagaccagcctagccaacatggcaaaaacctgtctctactaaaaatacaaaaattagctgggtgtggtggcacaggcctgtaatcccagctacttgggaggctgaggcaggagaattgcttgaacccaagagatggaggttgcagtgagccaagatcatgccactgccttccagcctgggcaacagagtgagactatttcaaaaaaaaaaaaattctcatacttactaagggctcttggatgccatggaaacaagagagggctgaaagacctctctttcttgatgtggaccatgagcgatgttatcctgtggaaaagtacttgtctctgttcagtgttcttgggcacaggacagctacccagtccttgtgcctgtggagtcactcaaacacacacaatgcccacatgaagatggggatatgcggtcttggatgcctaatttactacttaaaattaacacacacaattagatgattcccttttccctcccctccccttttttttttttttttgtttctttttttttttttctgtgacagggtctggctctgtcacccaggctggagtgcagttacgcaatcatggctgactgcagcctcaacttctcaggctcaagcaatcctcccgcctcagcctcccaagtagctgagactataggtgcatgccaccatgcctggctaattaaaaaaaaaaaaaaactgtagagatggggtctcgctatgtggcccagactggtctggaactcctgggctcaagcgatcctcccaccttggcctcccaaagtgctggcatgacagggatgagccagtgcacctagccttgataatttccagtggttctctatgcttagagcattactctcatcttttttttaaacagtctagaatgctctcttaaagcctccataaaaataactccttgtttgtgtatcctttggtgaacaatccaatgacttgcaggagcacttccaggcatccccagccgttgcaggcctgcagacttcttccctggcccacacttgctggtctgtttgttcactctgcagtgaacccttctgcttacagcttttccagctaaccttttgactcacaatgtagcctctgacaaaaagcagaccagtagttaccaggggctggggatgggagagaggagggtgttgactgggaagataacagagggacattttcaggtgatggaaatgttagatcacttgattgcagtgagggtcacacaagaagtcaaaacttattgaactctctccgtccagtgggtgcatttcatggtgtgtcaatgaagcctcaataatgttgtttttaaaaaatggtgtcacctcacctcctggcttgtagtgtttgtgtacctaatatcaatcttgctaagtttcctccagccaagcaagtctctgcttttgctgggctgctctgcagaggctgtgactgctggatgataacccaggttacataaaagtgtagaaaccatgtgcaaacaaatgatacgtggcaaccagcttttatcttggtgctggagatctgcagggcgtggtggaaagggcggcaactggacagtgcaatggttcatttcacctcctgtcaccacatggggctgtgggggcagctctgtcataccttccaattttccaagctgaaaatccaattgtcattgctgtttttgaaatcttacatttttaaaaaactgataacaaattcaaaatgtttaagtatctatgtggggaaagtgaatcaggcctgagggttgtggactgctttctaggtttccagcctgtgacctctgcagcagtggaggcagaggagggctcagaggtcgggagggaaggggaaggagcatgaagaagtgtgattctgcacgtaagcacggcccatacttttactcagaacccaagacaggcagttgacaagaacgtcggaagatgttcttcctcatccctcgttcttattttgcagtccctccctgcccctacagctgttctctgaaagctgtcaccctcatccacaaaaagatcttggaggccacaggcaaggcagggagggaagctccgaggactgatgctggctctccttccttctcctcccaactccccctcccaactggcactgaaggcaggtgttcctcaggctcggaccctgcctgcctttgttcgttttctctctcctgtctgcaggcattctgatccatcacaatggctgttaacattcatgactcccacatctccagcaccagacccttgtgtatccaactgtatagagagacatctcaacttctagactttcaagaccaaacctaactccttacttcgtcttcctaatctggccccaccacccagcctactccacctctataaatggcaataccacccacggtctgcccacatcagaaacccagatgtcattcattaattcattcattcattccttttttttttttaaacagagtcactctgtcacccaggctggagggcagtggcacaatctcagctcactgcaacctccacctcctgtgttcaagcgattttcctgcctcagcctcctgagtagctgtgattacaggcatgcaccactatgcctggctaacttttgtatttttactagagatggggcttcgccatgttgtccaggctggtcttgaactcctgggctaaagcaatctgccagcctcagcctcccaaattgctgggattacaggcatgagccaccatgcccagcccattctttctttttttagagatttgattctttttttaatttttaaaatgatcatacaataaaatgaatgttttcaggaaaaggtgtacagttctgtgaatcaaacagacagagagattcccgtaaccaccaacaaaatcaagataaagagcaacgatagtcacatcttcccttcacccctagccactacgaaacacagatctgctatcattagggttttatcttctcaagaatgtcacatagcttttcgcaacaggtttgcaacagaacacaggtgtcatggaaactacccctaaaagccaaaatgggaaaggagaagactcatatcaacattgtcgtcaatggacacatagattcgggcaagtccacctctactggccatctgatctacaaatgtggtggcatcaacaaaagaagcattaagaaatttgagaagaaggctgctgagatgggaaagggctccttcaagtaagcctgggtcttggataaactgaaagctgagcgtgaatgtggtatcaccattgatacctccttgtggaaatttgagaccagcaagtactgaatgactatcattaatgcccctaaggaatgagaccaccacttctcctgttgtccttcccagcttctacccaaccttcccttttccctagtttataagacaggagaaaagggagaaagcaaaaagttggaaagaaacaaaagtaagataaatagctagacgactttggtgccaccacctggccctggtggttaaaataataataataatattaacccctgaccaaaactactggtgttatctgtaaattccagacattgtatgagaaagcactgtaaaactttttgttctgttagctgatgtatgtagcccccagtcacgttcctcatgcttacttgatctattatgaccctttcacatggaccccttagagttgtaagcccttaaaagggctaggaatttcttttttggggagtttggctcttaagacgcgagtctgccgacgctcccggccgaataaaaacttcttccttctttaatccggtgtctgaggagttttgtctgtgactcgtcctggtatatcccaggacacagagacttcatcacaaacatctttacagggacatctcaggctgactgtgctgtcctggttgttgctgctggtgttggtgaatttgaagctggtatctccaagaactggcagacctgagagcatgcccttctggcttacacattgggtgtgaaataactaatcactggtgttaacaaaatggattttattgagccaccctacaaccagaagagatatgaggaaatcattaaggaagtcagcactatattaagaaaattggctacaaccctgacacagtagcatttgtgccaatttctggttggaatagtgacaacatgctggagccaagtgctaacatgccttggttcaagggatggaaagtcacccgtaaggatggcaatgccagtggaaccatactgcttgaggctctggactgcatcctaccaccaactcgtccaactgacaagccctgcttctccaggatgtctacaaaattggtggtattggtactgttcctgatggccaagtggagactgttgctctcaaacctggtgtggtgatcacctttgctccagtcaacactacaactgaagtaaaatctgtcaaaatgcaccatgaagctttgagtgaagctttttctggggacaatgtgggcttccatgtcaagaatgtgtctgtcaaggatattcattgtagtaacaatgctggtaactgcaaaaatgacccaccaatggaagcagctggattcactgctcaggtgatctatcctgaaccatccaggccaagtcagtgctggctatgcccctgtactagattgccacatggctcacattgcatgcaagtttgctgagctgaaggaaaagattgatcgctcttctggtaaaaagctggaagacggccctaaattcttgaaatctggtgatgttgccatcattgatatggttcctggtaagcccatgtgtgttgagagcttctcagactatccacctctgggttgctttgctgcttgtgatatgagacagacagttgcactgggtgtcatcaaagcagcggacaagaaggcagctggagctggcaaggtcaccaagtatccccagaaagctcagaaggctaaatgaatattatccctaatacctgccaccctggtattaagcagtggtggaagaatggtcttagaactgtttgtttcagttggctatttaagtttagtagtaaaagactggttaatgataacaatgcatagtaaaactttcagaaggaaaggagaatgttttgtggaccactttggttttctcttttgcatgtggcagttttaatttattagtgtttaaaatcagtgctttttaatggaagcaacttgaccaaaaatttgtcacagaattttgagacccattaaaaaagtttaatgagaaaaaaaaaaaaagaaagtcacataaacagaatcctacagtgtgtaaccttttgagctggcttctttttatttattttatttatttatttatttttttgagacagaatctcactgcaatgcccaggctggagtgcaatggtgcaatctcagctcactgcaacctctgcctcccaggttcaagcaattcttctgcctcagcctcccgagtaactggaattataggcatgcgccatcatgcctggctaatttttgtatttttagtagagacagggtttcac[131 bp omitted]ctgagcttcatccatgtcaccatgcctggctaatttttaaattttttgtagagacaggatgtcactatgttgcagaggctgatctcaaactcttaggctcaactgatcctcccatctcagcctccaaaagtactgtaattacaagcatgagccaccacactcgacctcctatttacttcaccttggaagctacagtgttacccagagcctataaacaaacaaacaaaaacaccatggatattttgttcctggtacacaaattaatgtctttaaatccaccaacaccactatacattctatgcaattaaaaaattaacttgaggccgggtgtagtggctcacacttgtaatcccagcactttgggaggctgaggagggcagatcacttgaggccaggagtttgagaccagcctggccaacatggcaaaaccccatctctactaaaaatataaaaattagctgggcatggtggtgtgcacctataatcccagctactctggaggctgaggcaggagaatcacttgaacccaggaggcagaggtagcagtgagccaagatcatgccactgcactccagcctgggtgacagagtgaaactgtgtctctaaaaaacaaaaagaaaaagaaattcacctaaggcacatgaccagtaagtcccttagtgctagtaccgtctatgcaaaatagcaaatacagagtgaaacaaaccaatgcaagcatttatgtgaaattgggctgcatgcgaaatctggcttcatgcttaactacattaaaaacaattgccaaactgtcaatgtatttcttcacaatatttcttattttaacttcatcacaactaagagctttaactatgaacaatgttaactagtcaaatttctgtaattttccaccatgttttaaataatattttatttttattttattttatttttttgagacagagtcttgctctatcatccaggctggagtgcagcagcatgatcttggctcactgcaacctctgcctcccaggttcaagcgattctcctgcctcagcctccctcaagtagctgggactacaggtgcccaccatcacgccctgctaatttttgtatttttagtagagatgggtttttaccatgttggccaggctggccttgaactcctgacctcaggtgatccccttgcctcagcctcccaaattgctgggattacaggcctgagccactgcgtccagtcaaaaatatcttattaactaaactttttcaacttcctgttttttctgtatgttcatgaacacagacacttagagaaacagaaaaaaataaaaaactgtgtatgacttacatagaccatctatgacatgcttggacttcctgttgtgtcctaattttatttatttatttatttatttatttatttatttatttatttattttttgagacagagtcttgctctgttgcccaggctggaatgcagtggcatgatcttggctcactgcaatctctgcctcccggattcaagcaattctcctgcctcagcctcccaaagagctgacattgcaggtgtgtgccacttcgcccagctaatttttgtatttttagtagagacggggtttcaccatgttggccaggctggtctcgaactcctgacctcaggtgatctgcctgccttagcctcccaaagtgctggaattacaggcatgagccactgggccccacctgtcctaaattttttatattttaaataacccctcattttactttaggacagaaatttacaatgcaagatcctttctcctacaaaagtattttctttataaccttccttaccaaaaacacatctttatatccataactgtcttcacatctctctcccctttgctttctaccttgtttcataaataactttcccaagcccataatgtgaatcaacctctagataacttctgaattagacaaaatttttcttattctcaataagaacgcatcttctttggcacattttacatacagaattatatgttaactagaattcttattcttagtaatcttaaattttagtgaaaacctaggaagcaagaaatcctgaactgccaaacagatgttagcattggcaagacaattctacaatttttaaaaacatgtttgcctacatcataaccctttctgaattggaaatgtcccagacatccaataaacacccaatataatttcaagattttaaattacatgaaaaatttccctactgcatttatcccatttacatttcattcatttttagcaatttatcctactaatgaaaattgggatattaaacaaagctagtcattatttcttcattaaccatttttataacctgtgaatatcaggtgttcacctaagtaagaaatttcgagttaaacacatgggtattttcacccgtaactcagaagattcctctgccttttttaaactaacaacattaaattagtcttacctatcaaaaaatcacacaaagatcattttgttcttggctagatttacaatcttataatcttttgtgccaaactctgacaccttaaaatatctagcagagacaaagataaaacccagacaaaaatgtatgctgacaattcagaagacatttctatttttattttaccgattatcttaaagccagcttatttattaaacatttacctaagtcacgtaaacttgaaaaatgcttggacccatacacttaatttatgagtgctcctttatttactggccaattttggtaccctgcaaaaacaacatataacatccaggaacatatgtacttgaaaagatccaatagcttttcctagggattcttgctgtgagatagcaatacaaattcaccagtttataaacatactcacacaggtaaactttgttttccctgataggtaattcaatgaaggctatgaaccaaaattttgagtaaagcactttctatgatagttttatttttattttatttttattttttgagacagggtcttgctctgctgcccaggctggagtgcagtagtgcaatcacagccacagcccactgcagccctgacctcccaagctcaagctatcctcccacctcagcctcctgtatatctgggactacaagcgcatgccaccttgcccagctaatattttaattttttttgtacagaaaggatcttcctatgtcgtctagcctggctgcaaactcctaagctcaagttatcctcctgctttggcctctcaaaacgctgagattataggcatgaaccactgtgcatgacctatagttttatttttatttatttatttattgagatggagtctcactttgttgcccaggctgaagtgcagtggcatgatctcggctcactgaaacctccacctcccagattcaaacaattctcatgcgttagcctcccaagtagctgggattacaggcgcctgccaccacatccagctaatttttgtatttgtaatagagacagggtttcaccatgttggccaggctggtctcaaattcctgacctcaagtgatctgcccacctcagcctcccagagtgctgggattacaggcatgagccaccacgcccagcctatagtttgatttttaaaggcccaacctccccagactccaaagaacactgaggccaaacagtaccacagaagaacatcatgtactaataaggccttgaaaccacctttgcaaagatgatgacagtgagagaagtctagcatgactgactccgtcttgcttctagccttacaggctggctgtcctcattattcctgggcataagccaagctaaccattggaggaatttatagtttaactttgaagcaaggatgataacaatctttccctaaaactataccctccttgctcagtgactgaagccacatttataaaactaatgaaaggccacaacattaggattatgggaggggcctggattctgttaaaatgtaggcatagtttcaataatctcttactgctcaggagtttgtggccagagatcacaagattcgtgacttccccgattgctcctatagacaacattgctattgtagaacgtgatcggtcttttgagatgtttttcagactttggcactctggcaaccaactgaccccacctgaacccatgactcatgactcaactggtcctgtggatcccacccagaggcagactcagtgcacaagaacaattttctacacccttacagttttatccccagctaatcagcagcacccatctcctagacctctgccaccaaataatccataaaaaccctagcttctgaatcctcagggagactgatttgagtgataactccagtctttctgtttggctagctctgtgttaattaaattctttctctactgcagtatcatggtctcagtgaattgtttttttctgtgcagtgggcaagaaaaatccttcaggcaattatagcccaacctggctttgaacagcaacataaaaacctggatacatggaactccatcccactttcccattcaacagcaaaatgagacccatggaggggccagagcgttgcaaaagaatatccattgatcaaattctcgtttctcacaactatattgacacacacacacataaacaaacaattatcaaaagcaattcaactgctacagcaacaaacaagccccaagtgtgtccatactaaaacagctggggtgccttcctctctcagttggtttttaaaggccaaaccaaacctttggtgggcagaagcctagggagtgggttctgctaattggttgggggtaaaactgtaggggtgtggaaaatggtcctcgtgcactgagtctgcctctgggtgggaaccacagaaccagttgagtcatgagtcatgggttcgggtggggtcagtgcgttatcagagtgcaaaagttgatcttgttccatctgcaaacagaaatatcttctgagtttcccaaatcaagagaagccctctggtacccaccagaaatcactcacatgtccagacgcagttgtgcacacacacaattactaatgtcaacaaaaagagtcaaactctgtaaaatatttgaagagatttattctgagccaaatatgagtgaccatggcccatgacacagtccccaggaggtcctgagaacatgtgcccaaggtcgttggggtgcagcttggttttatacattttaaggaggcatgagacatcaatcaaatacatttaagatatacatttgtttggcccagaaaggcgatacaactcaaagcagggtggggcttccaggctataggtaaatttaaacatcttctggttgacaattggttgagtttgtctaaagacctgggatcatagaaaggaaatgttcaggttaaaagattgtggagaccaaggttcttttgaagtcttacagtggctgcccttagaaacaatagttgacaaatgtttcctattcagacctttaaaaggtgctagactcttagttaatctcttcaggattgggagggcctgaaagaaaaagatctagctatgttaatagagattctttacagatgcacatttcccccccacaaaggacaactttgcagggccatttcaaaatatggcaaagaaacatgttttggggtaaaatattatgactttcttctttgtcgtgtaatgttataccagagtaagattggaaagtaagtcacaatatgtaagttaaataaaacccatctgggctgggcatggtggctcacgcttgtaatccctgcacttttggaggctgaggcaggcagatcacctgaggtcaggagttcgagaacagcctggccattatggtgaaaccccatctctacgaaaaatacaaaaattggcagggcgtagtggcaggcacctgtaattccagctactcgtgaggctgaggcaggagaattgcttgaacccaggaggcagaggttgcagtgagctgagatcgcaccattgcactccagcctgggcaacagagtaagactgtctcaacaacaacaacaaaaatctgatgagaatttatggtttgtagagcatgacttctctagaccccttagataggaatttgggcaagattttaaaaatcagagcttagttctcactaacaagccccaagagtgtccaaactgaaacagtcatggtgctttcctccctccatcatttgggcttattcaacctgcaaatggaaattccttagaaaattcccaaattgagaggagcccttcctgctgtctggaacccagaaaagacactcatccatccagacacagatatcaaatttcaaagtctgttcttcctaggcaatcagcaatacatttggggctggcagcagcagagccaaagagaaaaagatggaaacccacctccagccaaaaaaaggtcagacagctgtacagggggcttctgaaagtcccagtctgcagcagctgagccacaagcaatgtgttcccaggtagggaaccaaaatctgttactgaaatgccagggctccagtctaggtcccgttgctcactgcacagaaagccaatcaccaagacaatgagtactgcctgggaagaaggctttaattgagtgctttagccaaggaaaatggggatcagtctcaaatccatctccctagtcaactaaaatcagggggttatacagcagggaagaaatgtaactacatgtgggaaaaccagagttagggagaggtaaggaagaggagttggtcaaaggaattagggagggataaggaaatcaggagggatgaggggtctggcatctcattgtctggatgcagtgatctggtgagtttcaattcgttgatttcctgtggcaagaactcagataagacaaatgcaggcttcaaactttaagaccaggagggggccaggcacagtggctcatgcctgtaatcccagcactttgggagcccgaggtgggtggatcacgaggtcaggagatcaaggccatcctggctaacacagtgaaaccctgtctctactaaaaatacaaaaaattagccgggtttggtggcatgtgcctgtagtcccagctactcaggagactgaggcaggagaattgcttgaacctgggaagcagaggttgtagtgagccaagatcgcaccactgcactccagcctgggcaacagagaaagactccatctaaaaaaaaaaaaaaaaaaaaaaaaagaagggtgaatttctacgttgatccaaaagaagcatctatgggacaatcaggccagtttcatgaggaatataaattggatcctgtcattgccctgaataaaacttttcaatggctttccattctggcctcctcctcacagcctttgaggccctgcctctctctccaagcttctctggggccatccccagagaagtgtcactgacatcgctcttctggcctggacttctctctgtcccttgagcaggccaagctctgaatgtctgcatgcaccatgccttccactctttacctggctagttccccacttcttccaagtttctgtccaatgtcacgccttagagaggctttccctgatcatccaatatcaagtagcccccttctgatattatctcacactgcgctctcatggtttgatgtttgtatgtgtgtgttcatttgtttaacgtgactcctactagactgagaagcccatgacagcagtcaccacgtcagttttctttgtcactatatacccagtgggtgcctaaaaccgtgcctagcacagactgggcatttgatggtgaataaatgaatgaatgattttttaaaaatatctctaattttctactattataaataatgctatgagaacatccttttacataaaggcacgtgcactgtgcatttcctacaagtcgtactgttgaattaaatgatatgtacatgtaaagctttgataaatatcgatgaattaccttccccggctgagtcaaccctttcttccccaacagtctgtaagagaccccataactctgctgacaagagaaaatattgtattttaattttttgagatgatatttagaatttagaaacttaagtattagtctgggatttccagagaaacagaaccaatagagtgtgtgtatgtgtgtctgtgggtgtgtctgtgtgtctgtgtctctgtgcatgtgtctgtgtgtgtatgtgtgtctctgcggtgtgtgtgtgtctgtgtgtgtgtctgtgtatgtatctgtgtgtgtgtctctgtgcatgtctgtgtgtgtctctgtgtgtgtgtacctctgtgtgtctctgtatgtttttgtatgtgtgtctctgtctgtgtctctatgtgtgtctctgtgtgcatgtctgtgtgtgtgtttctctctgtgtgtgtttttgtgtgtgtctgtatatgtgtctccatgtgtgtgtctgtatgtctctgtgtgcgtctgtgtgcatgtatgtttgtggctctgtgtgttaatgtgtgtctctgtgtatgtgtttctgtgtgcatgtttgtatgtgtttctgtgtgtctctgtgtgtttttgtgggtctgtgtgtctctctgtgtgtgtgtatatctctctgtgtctgtgtgtgtctctgtgtttctgtgtgcatgtctgtgtgtgtgtccatgtgtgtgtctgtgtgttactgtgtgtctccgtgtgtgtgtctgtgtgtttctgtgtgtgtgtttgtgtgtgtgtgtgtgtgtgtctgcatgtctgcatgtgtgtataaagagatttatttaaggaattggctcatgtgattgtgaatgcttgatgagcccaaaatctgacggaggaagctggctgactcgaggctcaggaagaagttgtggttgagtctaaagagagcctgctggtgagccaggaagacccactgctgcagacaaagtctgaatccagcatgcaggagaattctcttttgcatgtggaggtcagccttttgtgctgttcaggccttcagtgactggaggagtcccccacattttggagggcaatctgctttgctcagagtccaccaatgtaaatgtcaatctcatccaaaaacaccctcacagcaacacccagaataacgtttcaccaaatatctgggcactgtggcgtggccaagccaacacataaaattaaccgtcatactctgtattattttcatattaatctcccagattaaaaatgagatagacaatatttacatattgtgtagagtcatttgtgtttctcccaatacttgctttgttcttatttgacttacaggagttctttgaatattggcttacaaacctcatatcaggtgtataagtagaaggatagtggccttttactttgttgattgtaatgtttttcataggttatctctttttatgtgctcaaatttctcatcattttttgatgacttctacattatgtcatactgggaaaaagcctccttatttataagacttttaaaattacacaatacctacacaacatttattatttttaaaaacatttttgatcttgaatgcacctgccttttattcttgttacctggctgtaattcttcccagtggataggcagctatcccaacataatttactgaatagtccatcctttcctacagtggtttgaaatgaacctggatcacttaagtaggaagaatcctctaaatgtaatctaaaacaacaagatttcatcatttttacccatccttacccataatgaggaaaaacattaaagattcaaacatccagtgttggagaaggtgcaggggaagggattctgccatgtacagctggtggaaatgtaaattaccaaacactatcaggaaggtaatatgcaaatatctatcaacaatttcaaggcatacctctttgaactagcaattacataaattatagatctaaagattcatctaaccaaaatactcacacctgttcagatagctagctagctagctagatagaaagatgatagatagatagatagataggtaatagataaatttgcagaggcactgtttgttataccaagagaactgtaaactatgtaaattaatcctaaatggttacataaattataagacagtcctaaaatgaaataccatgtagccattagaaagactctagattggtataggctgccatgaaaagatcactaaagcatattgtaaggtgaaaaataaaatttcaaaaaaaatatggagtatgattccatttatgctttttcttttctttttttgagatggagtcttgctctgtcacccaggctggagtgcagtggtgccatctcggcccactgcaacctccgcctcctgggttcaagtgattctcctgcctcagcctcacgagtagctgggactacagacgcctgccaccatgcctggcttatttttgtatttttagtagagacagggtttcaccatcttggccaggctggtctcgaactcctgacctcaggtgatccgcctgcctcagcctcccagagtgctgggattacaggcgcgagtcaccgggcccagccccagttatgctttttttttttttgaaacggagtctcactctgtcgcccaggcgggagtgcaatggcgcgatctcggcttactacaacctctgcctcctgggttcaagcaattctcctgcctcagactcccgagtagctgggattatgggtgcacaccaccacactggctaattttttgtatttttagtagagacggggtttcactatattgcccaggctggtctcgaactcctgggctcaagtgatctgcctgccttggcctcccaaagtgctaggattacaagtgtgaggcactacacccggccccgtgtatgcatttttaaaccaaatatttgtatacgcacatatatggacataaacaaaatagaggtttcctctgggaatggagaagtgtcagggagaagtgaaacggcatttcacattttacttttgtaccgttgggtttttttaaaggctatattcacacattataatgcaactttttaaaattagagaaataataatgggaaaccattcagcaccttgattctgaccaagtgagagcagataaggcagcacagggattcaagctgcctggagacctccagggtcactgtgagggtggctggaatcatgggaataaataaatgatttaacatgctcaggcttctaagtgcccatccccggggctgcggaggagcgaggtgcttaaaccgttcccaagcctcaggcattgaaagcaggagtgttttctctaagaaggagggtgctgtgctgtaattgacctctttggcattcagcgtctgcacgacatccagtgcagctctgggccggcggaagagaccaggctgcttgtgctgggaggggccgctgcccaaggacaagtcctgtactcacagcaacgctgaatcgcagtcctgggccatctggccccggcctcataatcactcttctgtcatgaatactgaatgaaggtaaacatacagtcacagggctgtcttggcagcacccaactttaaacctgtggcctatttctagctctccactgtgctgaattctgtcaaaaacaaacaaataacatgctaaaactattttgtgaacattacttatttcacattaagaatgttgctctgttattgtttttttttttttttgagatggagtcccgctctgtcgcccaggctgaagtgcagtggcgcgatcactgcaacctctgcctcccgggttgaagcaattctcctgcatcagcctcccgagtagctaagattacaggtgtgagccaccacgcccggctaattgttgtatttttggtagagacagggttttgccatcttggctaggctggtctcgaactgctgacctcaggtgacccgcccacctcggcctcccagagtgctgggattataggcgtgaaccactgcaaccagccaacagcatggttttggtcacctcaaatgaggacacgaatatataaatctcacggttttggtattgcatcatatttttcatacactgggaaacaaaaaatggaagaggtgtaggctgtcctgacctctgaaaggccctgaggggacagtggccatcttttggtttcctggcttctgaaccccttctgtgtttagggaactggccaagtatgagccttgtgaggaggcagagcccatctcccactagagaagctactgatgcagggaccttgttttccaagcatccctgatgcctgcgtttagccaatcaggtgcacctgccccaaattctgaatctgaggctaatggcacaaaggaggaaaagcagaaaattatttctggcagtggcagtagtggtggcagacagaatgtggctctaggtcctagtgtgcggtggcggggggactcccacgtccttcctggactgagttaatggcatgacttttaatgtggccctggctgtgcagcttccttgattctagaagcctggttttccagccttcctggcacatctctgagctacccaatatcttatcattaaatccctaaatgagccagagttggtctctgttgctgcaattaacagcgattgctgagacacgagtccagcacaatgatgatgagcaaggaagcctgcgttctgttgagagatgtgcaaaccattagtaatcagaaaaatgagactacactaaaacggcatggagacgctacttgatatccatgtgactggcaaaatctcaggtgctggataatgccaagagtgggcaggggtgtggctcagagatccagttgccttgcagctggtggctatacccttttcccttttaaaaaatttgttttctcggctgggcgtggtggctcgcgcttgtaatcccagcactttggtagaccgcggcaggtggatcacttgaggtcaggagttcgagaccagcctggccaacatagtgaaaccctgtctcttctaaaaatacaaaaattagccaggcatggtggcagccacctgtaggctcagctactcgggaggctgaggcaggaaaatcgcttaaacccaggaggtggaggttgcaatgagccgagattgcaccactgcactccagcctggtgagagtgactctatcaaagaaaaaaaaaaggtttgcttttttacatttttttctctttttttaatttttaatttttattttttgagacagtcagtagcctgggctggagtgcagttgtgcaattgtagctcactgcagcctctacctccgggctcaagtgatcctcctgcctcctcctcccaagtaactgggactacaggcacatgccatcacgcccagctttttaatttttattttgtagagacagggttcttgctgtgttgcccaggctggtctcaaactcatgggctcaaatcattctcccacttcagcttcccaaagtgccaggattataggtgtgagccacagcacctggtccctttttcttttttatgtctatttgggtcccatacactcaacagctcaacagaagaaagggctgtggctggacagagtgggccatgccgcttgcctcttacaggaactatcgccttaatcactttcttcttgcttttaatttattttttgagtaacattaaacattcacacacatactcacatacttagaaaatttcttcaacagcagaaaaggatatacggggaaaggtgagtttccctcccgcgccaacgcccagagccccttcccagagacagccgcggagaataggttcatgggtgacccttccccaagtcttttcctcactcagcatccagatgggtccttcggaaatgtgacacagattacggcacaacctctgccctccaggggcttcccatcattctccggatatcattctacatcctactgtggcgacaaagccctacgtgagctggacccagtcgcctgcccctgcctcattcccacggctctcccccaccctgtccccttgcagcctctctggcctccccggcctcctctgacaccccatggctcatctcatgacttgctgtacctctgcctagaatgtccctagagcctccgactctcctgctggagttctctccttaaataccacctcctccgagggccttcctgggctgcctgcgccgccttccttcctctgttctcccaatctgaggcttcctacccgactccagcccacagccccaggctttgtggtaatgtaactgttgtaaacttaaaattctggccgggcgtggtggctcatgcctgtaatcccagcactttgggagttcgaggcgggcagatcacttgaggccaggagttcaagaccagcctggccaacatggccaaaccccgtctctactaaaaatacaaaaattagctgggcgtggtggagtgcgcctgtagtcccagttactctggaggctgacgtgggaggatggcttgaactcgggaggcagagggtgcagtgagctgagatcacaccactgcactccagcctgggtgacatagcaagactctgtctcccaaaaaaaaaaaaaaaatcctaagcccccccagtgactgaacagactccctcttggccaaggggaccccagaaaaaccttaaaacttgagttcctggccatgataggatgggaggtcagacatgcctcattatacgtctttaccttttacagttcagacactgaccagcattcatgttaaaatagagatcataagactgacagaacggaccctttatggaagtaagataccaaattataaatagaactaaggtcatgccaggcaagtggtaagtcacgcacctctacacttaaagaataacttatgctctaactgccacgaggcttttctttttctctagcagataaacaagcactggcctcaggataagcagtgttgaaacatttggaagctcctgcagatgctgaataactgacctccagcctctgttccaccagccacaactacagctttgattggagaagagactgatttcagccactttctcctggtaagaagaacagggactggtcctggctggtttacagaggttgctcacaggttgccttcctgtcttgaaaataccttttgatatttagggcctaattgtaataacatttaaatgctaagtctccactccaaggtgaacataggttggttttttgtttatttgtttgtttgttttttgagacagagtctcattttgtcgcccaggctggagtgcagtggcgttatctctgctcattgcgtcctctgcctcccaagttcaagtgattctcatgcctcagcctcccaagcagctgggactacaggcgcgcccctccgcctggctaaattttagtagagacgggtttagccatgttggccaggctggtcctaaactcctggcctcaagtgatttgcccgccttggcttcccaaagtgctgggattacaggcgtgagctactacacctggccaacataggttgtatgttacatgcatatttgttcaatatgcatgtgtcatgactacctcatgaatattcatagcttctcctgtaatctgttgaatatgtatgtttagccaacccattcagtataaaactcctaccccaaaccctcttccttcgaagtacctgtctctggtcttggccgaaggcacacttcccagcctgtgggacagccaccttgcaggctgtaaccctttataagaaataaagttttcgtcaggcatggtgctgtgtacctgtagtctcagctactcaggaggctgaggtgggaggaccacctgagcctaggaggttgtggctgcagtgagctatgattatgccactgtactccagcctgggcaacacagtgagatcctgtgaaacaaaggaaagaaaaaagaaggaaggagggaaggaaggaaggaagagaaagagagagagaaaagaaaagaaagagagagacagaaagaagaaggaaaagaaagagagaaaggaaggaaggaagaaagaaagagagagagaaagaaaaagaaagaaagagaaagaaagggagagaaaggaaagaaggaagggaaggagggagggaggaagggagggagggacgggaaagaaaagagaggaaggaaggaagaaaggaaggaagaaggggagggagagagaaagaaagaaggggagaacagaagagaaagaaagaaagagaaaaagaaaatcagagtctcctccccttttctacatgtataaattctgtgagttttaagtaatcactattcatcaatctctggcccatcttgctgcaatggtcagctccatggagccaggccttgtctaccgctgaatccccagcaccggcgagtgctgtgatgggggctactcaggaagtcctcgctgaatgggtgtggagacgcatggccatcctcatgccttgcttttttccgctgaacagtacatgtcagggcctgatctacattggcatacgtggacctgcctcgttctttgtaacaggtgtgtgggattcctaccatgtggatgctccatgatctttatttaaccagagcctttactgatagacaggttgctcccaattttttattatcacaaaacaaacaacaaacaaaaaaaaaccagaaaagtatatccatacagtaaatctgtagatatcagcttcttggatcaaataatatggaatgtttcattttggtttttttgttttcttttgttttgttttgtttccttttttttctctatttttttgacacggagtctctctctgtcactcaggctggaatgcagtggtggaatctcagctcacttcaacttcctcctcccaggttccagcgattctcctgcctcagcctcctgagtagctgggatttcaggtttgccccaccacgtctggctaatttttgtatttttagtagagatgaggttttgccatgttggccagactggtcttgaactcctgacctcgagtgatctgcccacctcagcctccctaagttctggaattacaggcgtgagccaccatccccggccggggtgtttcattttgaaagatgtcatcaaatcgcagtccccagagaaatccccagagaatcgcagtccccagagtcacagggagatgggagaaaagagaagcagatgaggccagagagtgctgcagacagaaggcccgtggagcagaacttgcaagttctgggaggactctagctttgatcagagaggtggggagcctctgtggggttctgagtagggaagagacgtagcctacttatgtttttatttatttatctattttgagacagggtctcactctgtcacccaggcaggagtacagtggtgtaatcacgactcactgcagcctcaatctcctgggctcaagtgatcctcccaccttagcctcttcagtagctgggactacaggcatgtgccaccacacctggttaatttttttattttttgttgagacagggtttcactatgttgcccaggctggtcttgaactcctgggctcaagtgatcctcccgccttggcctcccaaagttttgggattacaggtgtgagccactgcacccagccctgcttatgtttttataagaccattctggctgctgcgtggtgtgaagtagggaaccagagagcagatgctgcagagacacagctgagaaagtgctgagagcctggaccagggctgtgctaaaaagtggctggattggggagctattctgaagacagggtggaaaggatttgctgatggggtaaagagaagaatcagagatttctcagggcctgagcaactggaaggatggggtggcagagtctgtgtaattggggccctattcccaagatgttggcaccatgggcctgtaggggcagcagctggtggaggggaggcatctgggaaacttccctttcccaccagatagggtttcctgatgttagcctgtcagggtggtttcaaaacaggtacagctgggctgcagcaggttgaactgtaaggaagggccagcctacaggcaaatgagggcagtggctaactcaaatcctgtcccccggctaggcccacactcttcctttccctccatttcccctgttggtgcatgctggtgaccaggtgcccaggtgcccatacagctggagacatctgcattcccttgctttttttttttttcctttttcttttttctttttgagactgagtcgctcactctgtcgcccaggctggagtgcagtggtgcaatctcagctcactgcaacctccgcctcctgggttcgagcaattcttctgcctcagcctgctgggtagatgggattacaggtgccagccatcacacctggctaatctttatatttttagcagacatggggtttcagcgtgttggcaaggctggtctggaactcctgacctcaagtgacctgccgcctcagcctcccaaagtgctgggattacagcactttggcatgagccactgggcccagctttttttttttttttttaaagaaatggagtctggctctgtcgcccaggctggagtgcaatggcgtgattgcagctcactacagcctggaactcctgggcttaagcagtcctcccacttcagcttcctgagtagttgcaaatacaagcatgcaccagcacactcagctaattttttaatttttttagcgatgggctaccgctatgttgcccaggctggtctcaaacaactgaattcaagcaatccttctgctttagcctcccaaagtgctgggatttccagcatgagccaccacatctggccccctttcatcttaaaatgcttcccattctgttttgggtgccccatatctgacctttaccctatctgtcattgcgggatgctgacaaggacagtgtggctcaatgtgggtttctgttgtcaagataccacaagggcatggaaccagaagggggctgtcagtttctgactggctgcagcagcttatcagaacgtatcacagatcaggagaggacgatatgatcaacggatgaggtaaccatcagctgagggcaaacagctcctaactaaagtcagcactttacagctggctccagtgcactctccctgtggctgcaggcagagcagccagggcccctcctccagcctcctcccacctcagagcttcagagcttcagacatccttggtgctgaggcctaggttccatgaggtcaaagggagaattcaggccgggcacagtggctcacgcctgtaattccaacactttgggaggccaaggtgggttgatcacctgagctcaggagttcgagaccagcctgaccaatatggtgaaacctcatctctactaaaaatacaaaaattagccaggtgtggtggtgagtgcctgtaatcccagctactcaggaggctgagtcaggagaatggcgtgaacccaggagaatggaggttgcagtgagccgagatcgcctctgcactccagcctgggcaacagagtgagactctgtctcaaaaaaaaaaaaaaaaggagaattcagactaagctgttttgcagcatcccaaggctgtgttgacctcacgtacagctgcatcatgggagtgggcggtgcgacatctcaagtccaactcaaccgagccatggttcaggctaagttcccgctggtgcccctacctggaacgctcttcagatagtggctccttctcacccattcaaatgtcccaggcctttcctgacaggccctgcccatctctctctctctctctctcaatttccctgcttgctttttgttgttgttgttgttgttgtttgatttttggtccttttttttttttttttttgaggcagagtcttcctctgtcgcccaggctggagtgcagtggcatgatctcggctgactgcaatctctgcctcccaggttaaggtgattctcctgccccagtctcctgagtagctgggattaccagtgcccgccaccatacctggctaatttttgtatttttagtagagacagagtttcaccatgttggccaggctggtctcaaactcctgacctcaagtgatgtgcccgcctcagcttcccaaagtgctggggttacaggcatgaaccccaccacgcctagccgatttattttctttcccttttttttcccccagacaggaccactggattggagtggtgccatcatagttcattttaatttccaactcctaggctcaagtgatcctcccgcctcagcctcctgagtatctaggactacaggtgtgcaccaccatgcctggctaattttttatttttatccttttttgtagagacaggggatctcactatgttgcccaggctggtctcaaacacccagccttaagcaatcctcctcctgcctcagcctcctaagtagctgggattataggtgtgagccaccatgcctgactttttatctcactttttgtagagacggggtatcgctatgttgaccaggctggttttgaactcctggcctcaagcagtcctcctgcctgggcctcccaaagcgttgagatcacagacgtgagccaccttgcctggcctacttcctttcttcctgtaaaattgccttgttggtttgtctacttgttttctgttcatcctgttcactcttgtctccagctcctagaacagtacctcacacagagtaacggctccatgtgttttgtgacagggaagcagacagtgtggcttgttggagaggagccacatacccccgccccccgattcatacatggtgtgactcagcccgaaccattgctcagttgagttggatttgagatgatgcactgcccactcccgtgatacagctgtgtgtgaggtcagcacagtcttggggtgctgccagacaacttagtttgaattctccctttgactcattggaacctagacctcagcaccaaagatgtccccataccagtaacccgggcaacagaatgcagataaaggacaggagacaaaaggcgcaggttctgacacattctttgcttgtgtcatcagctagcaagtattcacaggcacatccaacctccatccttacattccacaaggatttgagtgtctgttataggcaagggacaatgctaggtttttttttctaaaaacaaacttggggctgggcatggtggctcacacttgtaatcctagcactttgggaggccaaagcgggtggactgcctgagctcaagagttcgacaactcttggtaacatggtgaaaccccgtctctgccaaaaatacaaaaaattagccagatgcagtggcgtgcacctgtggcccagcttctcgggaggctgaggtgtgaggatcacttgagcccgaaaggtgaaggctgcagtgggccgcgattgcaccactgaactctagcctgggcaacagagtgggaccctgtctcaaaacaacaacaacaaaataagaaagaaagaaagaaaaagcggaagtgagagatggatgtgcgtgtagtcgtgtgggataattgcccatgggaaggaaacagaattcaacctcttggaatgtaggggg[136 bp omitted]atggtgaaaccctgtctacaaaaaatacaaaaattagtcgggcgtggtgttgcacacctgtaatcccactacttggaaggctggggtaggagaatcacttgaactagggaggcagaggttgcagtgagctgagatcgcaccactaaactccagcctgggtgatagagcaagactctgcctcaaaaaaaaaaaaattggactctgggtgaaataagtctgttggggacaaaatctggtgggagacccagaaggtcaagctgctttagaaagagctcaaccactgactttcctctttttgaccacatgactcttccaggtataaaagcctgccgttggtggaaaaggaaaaggtggtccagttagacaagatgccaccggcttctgaaaccagacatctttgaaaacccacccatctacctgcaggaaaaggcaagggacctgacctcgcctgggctcagggaagaggttgctgggatcataaccccaggaagagacgggatggaaggagagcatgcagggagcagaggacaggctactctccaaggaggagagggaagaggccacagaaatggaaaaggggccaggacaagtcagtggagagatggtcagggcctggcgaggaggagcaggacaaaagcggtggagctcagccccgtggcggcagggccactcccattcatctggtcctctacttctgaagttctcgaatgcagaatgagatgtacagatgggccagcaggtgatatgctatctgtcataggttaaggcctcattattttattcatttttaaacttttttttttttgagacagggtcttgttctgtcgcccaggctggtttgcagtggtgccaccatggttcactgtaaccttgaagcccctgggctcaagtgatcctcctgcctcagcctccagagtaacgaggactacaggtgcacaccgccatgcccagctaatttcttaacgttttgtagagaaaggctctcactgtgttgcccaggctggtcttgaactccttgactcaagcaatcctcctgtcttggcttcccaaagtgttgggattacaggtgtgagccactgctcccagccacaagttttattttaaatgtttacctttcaatgatcacttcgaggagatttaagcttactctttcttttttttttttcttgagatggagtcttgctgtgtcgtccaggctggagtgcagtggtgctatcttggctcactgcaacctctgcttcccaggttcaagtgattctcctacctcagcctcccgagtagctgagactacaggcatgtgccaccactccctactaatttttgtatttttagtagagtcggggtttcaccatgttagccaggttggtctcgaactcctgacctaaagtgatctgcctgcctcagcctcccaaagtgctgggaggcatgagccaccatgcctggctcattgtctagtttttaccaagaagatgatgagatatgccagagggctccgtatctgctatgagaacgtcccccaagagcagctggccgtggtgctgcagctggagctgtgcttggagctcttcttcacccccatggcggtcaccaccttctgccactggcactttgtgcagatcatgctctctggccccaagtggggacctggaggtgctgaagagccaagagactggctgccgtgaccctcttcaacttcctggtctgcttggaccctgtgctttgtctcccatggtgggttcccccagtggaagagtcaaattggtgggcaggcgcagtgttgttcagtgctctcgatgctgcattgaccccttgattttctttgtttttgtttttattttgttttgttttgtttttgagatggagtcttgctctgtcacccaggctggagtgcagtggtgtgatgatcttggctcactgcaacctccgcctcctgggttctcctgcctcagcctcccgggtagctgggattacaggcacccaccaccacacccggctaatttttgtatttttagtagagacgaggtttcaacccctactcaggctggtgtcaaactcctgaccgcaagtgatctgcccaccttggcctcccaaagtgttgcaattacaggcgtgagccaccatgcccagcctaaccccttgattttctgtttctcttcctccaccgtgcgcaaagcctttgacagagggccacggaggtggcagcacggcgggggtctcactgtctgggtggtggtgaaagctctggagagccagctgcagagagaagatgtggatcttagggacggccaatgtcaccttcacaggagattagaggcgccagcttggggtaaccttttggggaaggagggctcaaaaagaggaacaatgaaacagaactaaggtgagttctcctgtgcccagtttcagaggtcaaggagagtagtagatagctcaaacccaactcagccattgagtgagtgttttcattttgttccttggggtctatgatattttctattttcttttctttccttttgttttggtttgtttgtttgtttggttggttggttggttggttggttttagagacagggtttccctctgtcacccaggctggaatgcagtagtgtgatcacatcacactgcagcttctaactcatgggttcaagccatcctcctgcctcagcctcctgagtagctgggactccaggtgcacgccaccatggccggctaattgtttattttttatagagacagggtttcactatgttggccaggatgttcaacaacttctgccttcaagcgatcttccctcctgggcctccccaagtgctgagtttacaagcatcagccaccacacccagcctatgacattttcttcattatggctggtactgcctcatggtaagccacaagcctttttatcttgtaatatcagagtcttggaattctttatcttccctactctatatctagaagacagtagcactgacttatctgctgcagagctcttaattctatccttggccccgattcagaaaagggggttcctcatgctggatctgaacaacccagcacaggcaagtctggggagcaaggcaggagcctgcatgtggactcaaaggaccggcacccgaaacaaagcagtggctggcacaggtggacaaaccaggcaagaaaagcaactgtccttcggagcagagtccacgtgatgggaagaaacaggtcatgatacttttgagtggttacatcctactgtgtttgtgccttcttttttcctttctcagtcttgccaagagacccattaatttgtcttttcagaaaaccaagatcctctccagcatttatctttgttttcttgttgcattgatttctaatcttatctttattgtttccttccttttactttattgagtcttctctgttgctccttttctaacatgttaacttggatgctcgttcattttagcctttcttctttgctaatgtaagcatttagtgtgttggatagatttccctctaagaacagctttagtgggatgtcacaagttttgatttgcagcattctcattattttgagttctaaataggctccaaattccatgggatttttttatttgactcttgactttggaaatgtaccttaattttcaaacacagatgtttcccccctttatccttttgttattcatttctaactacagagtattgtttcaatggtatcagttctttgaaatttgctgagaattgttttttggcttagaatataaacagtattctagtattccagtaatgaaaagaagatagattctgtaattgttgggtgctatgttctctgtatataccttagatcaaacttgttaatttatgatgttcaaatcttcataacctttatatacattttcatctatttaatctatcagttatatgaagaggtgtgttacatgctccttctatcatggtaaatttgcctatttctccttgtagttctgtctccctggtgaattgaaactttcaaaattctttctgccttaacattgattttgtctgatattaacagagccacatcaacttggtttttgcttattatttgccagtccatctctgtccatccttctacattcaaccttgctatatctttatgttttaaatgtgcttttcctaagcagtgtatagagtggttggatttttttgtaatctggtctgacaactggacaatatttgtcttttaactgtaccattttgtccatttatagttataaaataataatttccaatatatttgaatttatctctgtcatcttattttaaatacttttagtgaagtatgtgcacatatattgaaatatacatgcataccgtgtgtattagtccattctcacgctgctagtaaagacatacccgagactgggtaatttacaaagaagagaggtttaattgactcacagttccacggggctgggcaagcctcagaaaacatagaatcatggtggaagggaaagcaaacaggtccttcttcacatggcagcagcaagaagtgcagagcaaaatgggagaagccatctgataaaaccattagatctcgtgagaactcactcactatcaggagaacagcatgagggtaacccaccccatgattcaattacctcccacctggttcctcccatgacacttgggattatgggaactgcaattcaagatgagatttaggtggggacacagccaaaccatatcaccatgcatggccaaataataagtgtacaggccaaataaactatcacaaatatcacagagtgaacacacctatttaagaaaaagcaaaaagtctaccatattattttgtgctttttatttccctcatcttttattttattttattttattttattttattctattttattttattttcagacacagtctcactctgttgcccaggctgaagtcaacggcatgatctcagctcactgcaacctccacctcctgggttcaagcaattctcgtgcctcagcctcccaagtagcttggattacaggtgtgtgccactatgcctggctaattttggcatttttattaaagacggggtttcaccatgttgaccaagctggtcttgaactgctgaccttaggtgatccaaccacctcggcctcccaaagtgctggtattacaggtgtgagccaccttgccaagccatccctcaccttttaatatttctttttttcttctctctagccttcttttgagattcagttcgtttatttcttttctttctcatttcatttattcctccactgacttggaaactgtatgttctgtttccattatttagtggttattttaaacactgtaagatggtaggagttcctcaatgagttactccctccctcccttccttcttccctttaataccacacatcaaggaaaacccaacccaagtagcttcgaactatgtgaatctagggcagcagttttcaaagcactgtctgtgaggtcaaaactattcataatgctattaaaatgctgattgctctcttcaccttcattatctcacaaataatgtgcacagtggaggttttgagagctacgtgacgtgatatcatgacggaatgaatgcagaccagataggaaaatacagctgtcttctattaagccaggcattaaagagatctgcaaaaatgtaaaacaatgccactgtcacgaattttttgaagatatagttgttttttctaggaacgtgtcatttatattaacatgtaatggttttatggttattattattataagataagttaatacacatttttaaatttttctgttttaactttgttttttttttgttttttttttttgttttttttgatacgcagtttcactcttgttgccaaggctggagtacagtggtgtgatctcggctcaccgcaacctctgcctcctggcttcaagcgattctcctgcctcagcctcccaagtagctgagattacaggcacaagccaccatgcccggctaatttttgtatttttagtagagacagggtttcaccatgttggtcaggctggtctcgcactcctgacctcatgatctgcccacctcagtctcccaaggtcctaggattatagatatgagccaccacgcctggcaggaattttcatttttgcttttctttccttttttttcttttttcttttttttttcgagacagtgtctcactctgccacccagggtgagtgcagtggcatgaacacaactcactgcagcctcgtcttcccaggctcaagcaaccctcccacctcagcctcccaagtagctggaactacaggtgcacgccaccatgctcagctaattcttgtattttttgtggagatggggttttgccatgttgcccgggttggtctcaaactcctaagcttaaagcaatccacctgcctcagcctcccaaagtgttgggattagaggggtgagccaccacacccatcccttcagtaattttcaagagtataaaccgaccttgagatccacaagtttgagaattgctgacctggtgagatgacagacaggattactctgctaagtgcaattgtgcacatataaaaccttctgctacctgatgtgtctttaatgattcgaaatttcataaagtctaatgccacttaacctctcaaagtgagtttaaagtttgcctgataaaatgcaaagcttgttgagatattaaatatgatacttaacaatcagaactattccatgaggagataaagaagtaacaaagccggctcagatggatgggatgtaattgcgccgcacagacctgtattcaccatgttatgttagttcctgttctaaagatgctttttttttttttttttttttttttttgagacagagtctcgctctgtaacccagactgctgcagtgcagtggcatgagcttggctcactgcaacctccgcctcccaggctcaagcaattcttatgcctcagcttcccgagttgctgggattacaggcatgcgccaccacacctggcaaatgtttgtatttttagtagagatggggtttcaccatgttggccaggctggtcttgaactcctggcctcaagtgattcatcaacctcagcctctcaaagtgctagaattacaggtttgagccaccgcgcctggcctaaggattgtttaaattggagtttttcttcttgttttatggggaaggattacttcatctacaattaggtggaatattaacccaaactatatgtaggatttccaatcttagaggctataggaactgggggagaaggaaagcataatactaattatatttgtcctatgtcatcctagggaaagtgcatatttaattcctgtcagcaaagattaaagaaagattttcagggcaaaagttataaacaggcttagtgtgttttattttgaacgggggaattcacaaagcctttgtgaaagcctcaattttactgttagactacttgatagcacctagttaatataagctagggcgattcaactagttccattgcacctcccggtaaataaatggttcctgaggcattgtgttaagcgaggaatggaagtttgaaggttaccggcaaggctccttcagccctctccggttttcaggttaatggtggggagagtgagtgtccaccagaaagggactgtgatgtgacgttaggtcacttgatttctgtaaacttatgggagacctttctcctaaagatgggctcaagatgccaccatttacaatgttactctcaatgaccttggggaagtcctgctcctaggggtgggacacagtgataagagggaggggtgtgccgggcatggtggctcatgcctgtaattccagcactttgggaggctgaggcaggcagatcacctgaggccaggagttcaagaccagcctggccaacatggcaaaaccccatctctactaacaatataaaaattagctgggcgtggtggtgtgcagctgtaatcccagctacttgagaggctgagacaggagaatcacttgaatccaagaggcagaggctgtagtgagccaaaatcatgccattgcactccaacctgggcaacaagagcagacactccgtctaaagcaaacaacaaccaaaaaaaaaaaaaaaaaacacaagaggaaggggtggaagagtgtactgattgttggaccctgaggattgcaattttatcataacattctctacagtctcttttcaaaaatgaaccagcaatcagagatggcaccgattggtttggccttcttagcaacatctctcccttgtcctctgccatgtggtttggtggagctgactttacccccagctcctgctccaggggcaggtgtgaaaccaggaccctgctcatctacagttcatcctctgaccacagtgatggttcacacttgggtgcatgactcaatccagaccaatgaaagatgaacccaggctgggcatggtggctcacatctgtaatcccagcacatgggaaggctgaggcaggcgaatcagttgaggtcaggagtttgagaccagccaggctaacttggcgaaaccctgtctctactaaaaatacaaaaatgagctgggcgtggtggtgcacacctgtaatcccagctacttgggaggctgaggcggaagaatcacttgaacacgggatgtggaggttgcagtgagccaagaccatgccactgcacactccagcctgggtgacagagtgcacccactgtggatccagcctttttttttttttttttttttgagacagagtctcaccaggcttgagtgcagtggcgttaatcttggctcactgcaacctctgcctcccaggttcaagcaattctcctgcctcagcctcctgagtagctaggactagaggcgcgcaccaccccgcccagctaatttttgtatttttagtagagacggggattcaccatgttggccaggatggtctcgatctcttgacctcatgatccacccaccttggcctcccaaagtgctgggattataggcatgaaccaccgcacctggccagcccttctcttttaaccaccaggagaaagaacctctcttctactgatcttgaacttgaaggctggtccctctcttctgggggccattgtgaagagaggctgcctaagcctgaagtcaacttaaaggaaggtgaaacagagaaaaaccacacattcaggcatttgatgtcctaaagcagatctactctggggatttttagatttgaaaaccaaatattctccttccttagcttaaagcaagtttgaagctgagatggacataatgtaattgctctgcacaagcctgtatattcattgctttatgctcatccttgttctaaagattagccttttgcccattttctaattgaattgcttgattgtgttttgttttactattgagttttgtgagacatttatttagagtgtctcgctctgttgtccaggctggggtgcagtggcatgatctcagctcactgcaacctccgcctcccgggttcaagtgatcctccctcttcaacctcctgagtagctgggattacgagtgtacaccatcacacctggctaatttttgtatttttagtagaaatggggtttcaccatgttggccaggctggtctcaaactcctgacctcctcaagttgatcagcccaccccggcctcccgaagtgttgggattacaggcgtgagccactgcaccagccaacactgagtcgtatttctttagatttttgtgattgatgttcccattatgcttctctctcactgaatctcctaccttcttcatcagaggcagcgtcatactggactttaagtgcatccttcctgtccatgattttaaattgtaccttgcaaatatactttgcacctaaacactgtttagtattcttttgcgttttttcaaatatccataaatacctatagtacaagtcattctgcaactagctactttctaccccaaatcatccctttgctatctggcctccatcactaaaccttacatatctcattgatttattttgtctgctctagcagtccatcatattaataagacgagttttattttttccattctactattgatagacatttaaatcacttcccattctttgccagcatgacaatgctgctttgaacatccctgtgtgtgtctcttcgcgcacacgtggaagagttcttccactggtaggcacagcatttgcattctccatttcagtaaaagctgccaaggtcctcttcaacgtgatggcgtaaatccagctctttctgcaagaaggctcaccagccttcccaccagctcttctccccaccccagccctgcagccctgcagcctgaccctaggtaatgagtggtggggagtgacccaggcatgcacgacctgcccagaggaaagggagttcaaagaaggacccgagaccctcacaggaacctagcagattggcacaagtgccagatgtatccaggacagacactttccccaggactccaggggtaaaggagtgccccacctctccactccttgcctttcttaactgaattcagattgtcgtgaacattcaagaaaagcattgtggctgacttccaaggttactacttgagtccatcactacagcagttactactcttactgctccagaccgtcattacagcagttactactgttaccacttgagaccatccttacaagactgaaggaagggaggaacgtagaaatgaaaaccaaggaaaaaaagaaactgctttaagtaaaggctagcatggggaagaagagagctccccgcttctagtgagcaaaggcagcccccttatttattgggtaacaagagcacgaggaggtggcaacaattggtcagctgcttaattgatcagaggttcatgttgttactgacaggcttctattatgcctaatcataagaaacatttgttcagcttccaacaaagctgaagtttaaatgatgcaattacattcagcacagaggagtatctcccccaatcccaccatataaagagaaagcacatgcatgcaggagagaaacagtgaatggaaggctaggaaatcttggtcttggaggagagtgcagattggagatagagggaaggggaaaataagatgctgggatcttgagggaggatgtggggtggtggccaagctccctggttcatggggatgagaatgaagcctctgttggctctgggtcatgtgacatgggccaagataagacatggttcctgcagagagatggagcgtggtctgtctgtcttgtgctcatgtgtctgtgtcaaatggcttccgagggaactagagccacttaggtctatgtggtttaaggaaagcacaagtgaaaagaagccaggaatagtgcagaggtaggggatgggacaccaagacatgaggccagagtgtgagacagaatcagagctcctgcctgcagagaatgatgggctgtgtgaggagccctggccctctgcggacattttaataagtggccccactttcttaggtgctcatgtgtccggggattctagggaggttttgtgaggctgagctaaaaaaaataaccaattccagctaggcacaggggctcacgcctgtaatcccagccctttgggaggctggggtgtgaggattgcttaaggccaggaggtcaaggctacagtgagccatgattgtgccgctgcactccagcctgagcaagagggtgagaccctgtctcaagaaacaagcaaacaaaaataacctattccactttgaccctgaatagggaaaactgaccaaacaaggagagtagccagaggcagggatggaagcataggagaaactggcagtggacaagctcctttggaataatccaccaagagaggaaatgaaacagaatgcctgaatgaattatgaaagcagaacaaagtctgaaagaataatcagggcttgagatctagaaaggatcaatgagatttgtgggaacagactttcaggggaaacacagagggctaagcggcctgagaaacagctcaactcttgaccttcctcttcctgacacatagcaagctcaagtgtaaaagttcttggttcctgggggatcccgaaatggcagaggtggctgtatctatgcaccttattcaacaagttggtaaaagtccacttaaggctgatcaccaagagctgcctgcttagaaacaggaggaagctagatacctaaaatactcccagcacgtcctgggagatgacaccctaagctctcacctgggaaaggaaaaggatgagagacccaggtgactgcaggttcaccttgctggggaacaaggttttctcaccttcatttccagtgcgggagggaaaccagaatagcaaaagatcaagaaaactgaacaaaaactagaagagaaattggtggagggatgacagaggttgaaatgggaaggcaccaagcagaatcaggtatcctctacagagcagagaattgccctgagcacagaatgctatatcattttctcaaagtcacagagctgggaattgccaacagtgggactgggatccagatctgctcccctcattacttattctccctggatttctcttcagagtggagcaatgccctggcattcaactcgtctgtgatatgacagtcctcacactctgtgtagtgacctactatgagtggtacctgggcgctgcctgcctagaattcatccctccttcttctggtagcagcatcccaattttcctctagttaaccactccccctctactcttggtctgtgggatgtggggagggggacagggggagaaggggaggttggccccattatcactgcagggcatgcaacccagacttggcaatctcagtccatctagagtcaatcttttctagactcttctagactaattcagaaagcagctttctctttccacagggtggttaggaaggtagaaggtaatcctggagcttcccgccaccacgcaggaggaatttgcctgagagcaaagccagcatagagaagcagagctgagtcatggagacaggtggctgaaagtttcatttcggcatatggatctcaccattcctgaagccactttcaactcttcaatttcatagctaataaattctcatttttgcacaattagctgaagcaaggttttttgttacctggaagcaatgaatgcaaatgttttttaggtaatttgttaatagtaataaaagataaagaatataataataaagaataggggcatttccagggccgggcacagtggctcacacctgtaatcccagtactttgggaggccgaggcgggcagatcacttgaggtcaggagttggagaacagcctggcaaaaccccgtctctcctaaaaatacaagaattagccaggcgcagtggcacacacctgtaatcccagctacttgggaggctgaggcaggagaatcgcttgaacccgggaggcagaggttgcagtgagtcaagatcacaccactgcactctagcctgggagatggagcaagactacatctcaaaaaagaaaaagaataaagtcatttctgaattgtatcttttatgattttaaaaaatgaatcagagaagattcaaggcacattctgacatgcaagggttacagtcacagcccatgggccaggcatggcacttcaccccagtatgctggcgacggccctctctgcaccaataaatcagatgcctgcttaacaactatttcaatcagaagtgcattctgcagttttgaaagtttccacacgtattatcactcctcagtcataaaacaatctgatgaagttagtttctaatgccttttttttttttttttttgagacaaagtctcggtctgtcacccaggccagagtgcaatggcatgatcttggctcactgcagcctccgcagttcaaacaattctcctgcctgagcctcctgagtagctgggattacaggtgtgcaccaccatgcccagctaatatttgtatttttagtagagacggggtttcaccatgttggccaggctggtctcgaattcctgacctcaaatgatctgccaacctcggcctcccaaagtgctggtatgacaggcctgagccactgcacctggctctgaccacacgtcttccatcaaggacttacatcattctttttggccacccagaacctctgaactccctgcctgtgaatctacgcctgcccaagggagaagcagaaacttgctttctcagagtcggctcccatgtagggcacaggcatgtgaccaaagtccagccagttaccaagcccaggtgggggcagtgcagcatagctgtgacgttaggcccggaggccactctagggagctggcagcacacagccagctgccagggcggcagagagaggtgccgagggtgtggcagcagtgcccagcgtgtgaaccgcagagtgtgcgccagtggtggaggtggtggtgtctgcaagggtatcatccaggcataccctccaagcctggtgttctggctggcctggagattccacaagctacctaataccctttaaaaacaaaattcctaggctgggtgggatggctcacgcctgtaatcacagtgtctggggaggccgagatgggaggatggctccaagtgagaggatctctggaggccaggagtttgagatcagcctgggcaacatagtgagatcccatctctataaaaataattttaaaataaaataaataggccgggcatggtaagctcacacctgtgatcccagcactttgggaggccaaggcaggcagatcacctgaggtcaggagttcgagaccagcctggccaacatgatgaaaccctgtctctactaaaaatacaaaaattagccgggtgtgatggtgggcgcctataatcccagctacttgagaggctgaggtgggagaatgcttgaacctggaaggcagagattgcagtgagccaagttcgcaccactgctctccagcctgggcgatagagcaagactccatctcaaaaaaagtaaaaaataaataaaataaataagaacaaaattccttttccgcttaacctgacaagaggagagtctgctgtctgtagtgggaaacctgacagatacaatcaggagagcatccaaggtctccaggcggacagtcctctgcagctgcatcctgtctgtgccattggtccctctgccagcctcttggccatgtgtgtagcctgggaagaatgctgccctgctccacctgctgtggcaactgccactatgcgagatggccaggctgctccagctcccacagtggctcgtggtctgtgcctccgtcagtctggcttctcctggggcagcggctaccggctggactctggcccaggaacagggctttccctgtgctcgcctgcacctcgcaccatggtcctggccccacgacgactgaatctgccagtctccactcccctgtgcactttctgcactacagcagtgggatgtggtgacaggaacactaaaggattgaatgccgggatcctggagggaaattgaagctgctggtgcttctgcctgggtcctaggggagcaggaaacactgtggagtacttactgtgggctcagcacagttccattttaattgacaaataataattgtatctatgtatgggatacaatatgatgttttgatccatgtttacaacgtggaatgattaaatcaggccaattaaacacatccatcacctcacatactcatccttttcttgcagtgtaaacatttaaaatctcttttcacggctttgaaatatacattacattattatttattataaacaccattatgtgcaattgatcactaaagctgactcctcctaactgaaactttgaagtcttcagtcagcgtcttccctttccccatccagccccttcccccagcctctggtaaccagcatacttctcgccatgagatctgcttctagatcggctttttaagattctccatgtaagtgagatcatgcagcacttgcctttctgtgcctggcttatgtcgctgagcagaaggccctccaggctcatctatgctgccacaaatgacagggtttctttctttttcaaggctgactagtattccactgtgtatctacaccacattttcttttcttttctcttttgagatggagtttttgctctgttgcccaagctggagtgcagtggcacgatcttggctcactgcaacctccacctcctgagttcaagtgattctaccacctcagcctcccaagtacctgggattacaggtgcccgccaccacacccgtctaatttttgtatttttagtagagatggggtttcaccatgttggccaggctggtctccaactcctgacctcaagtgatctgcctgcctcagcttcccaaagtgctgggattacaggtgtaagccaccgcgcctggcccacattttctttagcgattgacctgatgatggatatctaggttgcttcctcatcttggccattgtgaataacactgcaatggacatgggtgtgcaggcatctctttgacatactgatttcaattcctttggatttacacccagcagggggatttctggatcatatggcagtgctacttttacttttctgaggaaactccgtactgttttccataataactgtattaatttacatttccgtcaacagttcggcgctatttcaaaggtttcctgtgctctaaagcactctattaggctctcgttgcagggatttggggaaaaaaagacactcccttgtccagagacatggacacctgctcgcatcccaatttgcctgtcattcactccttcatcaactgctcccggccaggacttgttcaagctgctgagaatgttttggtgaacaagacaggaagcggcagctctcgtgaagttcgcgttctggaaaagcaccggtgttggaggaacagcggttggaccttttccggcctggaatttgggctccccacaaaggagatgcactttagatgattattacttgatcaaactaataaaaggcccgagatagttaataataatgaaagcgtggcttcctcctccctgtttctaggccaagaggtggcaaggggtagcaaattaaaaacatacatattggtttaacctgaaagtatgtctatgtgcacagctctttttgctaaagacagcaaaaagtttttactagagcaacctaaaaccaattctgtgacctgagtagcacctcttaccaggaattgttgacaaaagatgaataaatagaacaatttcagattctggtaaagcaccgtgaagaaaacaaattgattagtgtaataagaagaggggaattccttttttatatttatttatttatttatttatttatttatttatttatttatttttgagacacagtctcactctgtcgcccaggctagagtgcaatggtgcgatctcggctcactgcaacctccacctcccaggttcaagtgattctcctgcctcagtctcccaagtagctgggactctaagcacccgccaccatgcccgactatgcgtatttttgtagagatggggtttcaccatgttggccaagctggtcttgaactcctgacctcaggtgatctgcccgcctcagcctcccaaagtgctgggattacagtcatgagtgagccactgcacctgacctatttttatttattttttgatacagggtctcactctgttgcccatgctggagcgcagtggtgcgatcttggctcactgcagcctcgaactcctaggctcaagccttagccaccagaatagctgagattctaagtgtgcaccaccacccctttttttccttttttattgttataggcatgggggtttcagtatgttgcccaggttggtcttgaacccctggcctcaagtgatcttcccacctccgtctcccaaagttctgagattacaggtgtgggccaccacacctggcccaggactcctttagatggagtggccaggaagggctctctgaggacagacattggaaagatgacagagaggcagctgtgagagggtgtggggcaaggacgctccaggcaaaggcaacagcagagacaaagatttccacgcaagacaagctcagtgtgggctggagacagtgttaggagacacggtgcatccacagaggtctcctgcaggtgcactggagagacgtggcccagaagcagggcaaggtgtgctgggaaagagaacgtggaggtcagcaggccatcaattcccctggaaccacacctggatgaagccgaactagtaaaccttttccaagcagaagaaaagatctggggtccaagccaagtgatcccactgcccaaacacatacctggtgggtcttcacctggtgggtctgcagctgaaccctggagtgcaaatgaaaacccactaggactcaggataggagggaacaaatatgagagtagtcccaggtgtgatgaaggagtggacctaccgggagatcaaggaatccaggttaccatgaggaaggacaaacacaaaacacacagtactgactgtgtcccagatcctgacccaagacatttatttatttatttttgcgacggagtctcgctctgtcacccaggctggagtgcagtggcatgatcttggctcactgaagcctccgcctcccgggttcgagtgattctcctgcctcagcctcccaagtagctggaattaaaggagccgcccccaccacgcccagctattttttttttttttttttgagacggagtctcattctgtcgccaatttttgtatttttagtagagacagggtttcaccatgttggccgagctggtctccaactcctgacctcaggtgatctgcccgccttggcctcccaaagtgctgggattacagacgtgagccaccgcactcagctgcccaaaagttttagatacatcaacccattcagtcttcacaaaagcccatgaggtgggcactatcatttcctccatttagagggaaggaaaccacagcccaggagactacaggacttgtccaagcacacacagctggagggagcccagcaaggctggaatccaggcagtctgcatcccagtccatgcccttgcctgccactctacatggcctcacgagatgcctctccaggtacctaaatgtagaagtcaaaggaatactgtggaagcagccaaggtctgcatttgggaatccatacgttagattcgtggaatcagttctggagaaaaggtggaatttttcaggtttttttttcatagaggtaatcaactaccaactttccaatggacacagcccatctcagtgtgaaagcctgtccctagagcagagccagaggaggtacagccagctccgactctgcaacttcagtaaggagcaagaagatttctgtttagaggttaccactccactccccaacaaaaaatgagagtagagcaaggtttccaggcagctgcctatactccgggaaaggatgttggtggagaaggaatcgagagagggccacactgttgggggcaaggcaaggggctcactgccaagggacagacagaaccagggaaggcaaagatcacagaaagggaacgggagtgcagagcttctaatggagagactgcatgatgctctcctgggctggagctggggagctgggaacagctaaggtatgcccacaggcacagaggcatctcttctgccccttggaacttctgactcggaggctgtcaacattccctctcttgagcaggagcaggatgggagaagttgcagctagattgctttggagtctatccagcatttggacataacctgtcccttgtgtggtcactggaaagaagttaagaactgctcctaggctggacatggtggctcacacctgtaatcctagcactttgggaggccgaggcaagagcatcgcttgaggtcaggagttcaaggccagcctggccaacatggtgaaaccccctctctcctaaaaatacaaaacttagccagccatggtggcacatgcctgtagtcccagctactcgggaggctgaggcaggagaattgcttgaacctgagaggcagagggtgcagtgagccgaaatcacgccattgtactccagcctgggcgacagactgagactccatcttaaaaaaaaagagaactgctcctgtgtagagttcagttgaggccaggcacaatggctcatgcctataatcccagcactttgggaggccaagccgggcagattgcttgagcccaggagttcaagaacagcctgggcaacatggcaaagcctcaactccgcaaaaaatataaaactaagccaggcatagtggtgtgcgcctgtagtcccagctacttgggaggctgaggtgggaggattgcttgagcctgggaggtcaaggctgtagtgagccgtgatggagccattgcacaccggcctggatgacagagtgagacccggtctcaaaaaaaaaaaagagttcagttgtctggttacaactgcagaaaataacctatgtgtggtggtccattttcaattctaagtgccttaatataggtttaaacaggctacaaagagataaagaagcagaatgtactaagtcacccccccacccccaccccctcctgcccatcctgcttcttgctttccctttcatctagctgccaggcgcctatcagtcaggacctccttaaccatccccttccacccctccaaagaatttagttgggccaggcacagtggctcatgactgtaatcccagcactttgggaggccaaggcaggcagatcacctgtggtcaggagttcaagaccagcctggccaacatggtgaaaccccatctgtgctaaaaatccaaaaattagccgggcacctgtaatcccagctactcgggaggctgaggcaggtgaattgcttgaaccgggtgggcagaggttgcagtgagctgatatcacgccacttcattccagcctgggcaacaagagtgaaactccgtctcaaaaaaaaaaaaaaaaaaagaatttagtttaggctagcttgcaaagtaaataattgtactctttcttatcagctaagtccagtcactatggccataactcaaatgtttgaagagtcctgagacagttgcaatgcattatgggctgcaataaaatgcagcagaaagaccctaaagaacatactgaaatccttaacccaaatatcaataggtgacatgcagaaagattgtaacccaatagtactcagccagtgaggaactaggggagggacttgtgcacttgggaataaattgcttgttgaaatcgttgcaggtgtgcccgcatgccagacaccccatcttgcaaggcagccactaaggtctcgcttctgctgttctcccatccctaagtccattctttggtttggacaagtgagtgtgtttgttttttctttttctttttctttttcttttttcccttttatctagctgccaggcacctatcagtcagggcttccttaaccaccccctcccacaccaccaccgaggctgcagtgcagtggcgtgatcttggctcactacagcttccacctactgggttcaagcgattctcctgcctcagcctcccgagtagatgggattacaggcacccgccaccacacccggctaatttttgtatttttagtagagacgggtttcaccatgttagtcaggctggtctcaaattcctgacctcaggtgatccacctgccttggcctcccaaagtgctgggattacaggtgtgagccacggcacctggcagagtttgtttctcacacaatttacaatagaggagtattctgccattttgcaaagtgttctcacatatgttacctcatttattctgagagagagggaggattattgtgggaattggctcatgtgattatggaggctgagaagtcccatctgtctgcaagctggggaaccaggagagctggtggtgtaattcagtccaaatctgaaggcctgagaactgatgtctgagggcaggagaagatggacatcccaactcaatagagagagcagagacagaaaacttgctcttcttcttttttttttttttttttttttttgatatggagcgcctgccaccacacccagctaattttttgtgtttttttgtggagacagggtttcgccgtgttggccaggctagtctcgaactgctgacctcaggtgatgcactcagctcagcctcccaaagtgctgggattacaggtgtgagccaccacacctggcagagccaccacacctggcagagccactggtttttttttttttaattgacttatttttcttacatataatttagccttaccctaaacaaaaataaatattaataacagtaacagccagcaattctaagtacttgctatgtaccaggcatatacatacatacgtacatatgggattttttgagacagagtctggctctgtcgtccaggctggagtgcagtgacacaatcacagctcacttcagcctcaacctcctgggttcaatcaatcctcccacctcagcctcaaaagtggctggaaatataggtacatgccaccacacccagctaattcgtttgtatattttgtaaaggcgagattttgccctattgcccaggttggtctggaactcctgggctcaagcgatctgcccacctcggcttcccaaagtgctgggattacaggcataagtcactgtccccagcccagcccagtacgtatgtttatagacaactataaacatatgtatacacacaacatgtggttgtgtaaagatgtgtaatacacatacacacaaacatatacatattcatttcaatcctcacagcaaacctacaaggtaggtatattagtctcctcgttctacaaatgaggaaactgaggcccagagaaatgagtgcccttgcccaaggtgacacagccaacaagtagccgccaggactgcagcccacagggccagctccagattccacgcttttaacccctgaaatcatgagtttaatggcttagctacaggttaagtcacttgccagggaacccagagctagcaatgggatgggaactgagatgtgaatcccagtagtctaacctcaaaacctgcgtgtttagctcctacatgcgttcccacatgggttatggacagctctactaatggaagagggcgctggactggggtggaattgtgaaagaactagcgacgtggagagaggcttgaagctcagcctaaataaatgttggggacagcccccactgacagctggacttggcccgccatcttcccttcttggtacctctcaatctttcgtaaaaataaaccaaaagctgacgttcaccacttcatgccatgcaaacaactgtttttggttttgttcttcaaatataaaataacatgaaacatgctttgtcaatgtacttacccccatcccatcccacactctctcttcccaaatacccgcatcaccctccactcttcagagatactagacggggtggctcagcagggctgggaacaaacactggccaatgtaaaggcttctgaatactccgcagcactggagagtctgtcttcagcacgatcccctgttaaccctaggaaagatgtgcacgtgacaggggcggggtgcgtcatggaagcctgacgttcctcatgccagatcagacgggaaggctgtaaaagggggaaggtgaggccagctggcagaaagcaggaggaacgcagccttgctccaggttcgtactcccatacctgaaacgcctcctccttctcccgcctacccaggctgaacacctggagaggggcagggtaggaatgccccctaggtgaccagagtggagaggaggacactgaaggggtctaaggatcacgagaccgcgtgtggcttgacttattcgccaagtggagattcctcgatcatcctcagagcctgtggtcccttccatctagtcaagaatgggcaggaggccaggcgagacaaaactcaaggggaaagccgtactcatttttatcaacatctccttgccaggaagcttgtggtattcactcaaatccaggacatgataaacatttacagaaaataataaaagcagatgatgtgaggacagtcaagagacgcaaagtacacttatgctccccctcctcatctagaaagtgggtctgcatggagtgtaacagcagaatctgacatagctgactccaccctgcttctaacctcacaagctaatggtctttgtcattcctgcacatcagccaagctaatcatgggaagaatttagtttacagtttaactttaaagcaaggatgacaataatcccttcccaacactcacccccaaggagataaggagggtgtacacactagcagctacatcatattaaagatttataggaacattgtgacctcagcaggacaaagaagttgcacagtgcccctcctcggacactcactgccacccagatgtccgctatcatcggtcacctcttgatcttaaacctcactctcttcccccttccctaatgtaaaaggagcccaaaattctattacttaagattgttctcaagacactaggtctgctatctcctcagtctgctggctctctgaaataatgtcatttttccttcccccaatatctcgtctcttgatttattggctgttgtgcagagattggtatgagctttggattcaactgcaggaggacggtgaagccagaagagatagagagagagagagaaagagaaatgagcagctgctgaatcatgagggcttccctaatggcagggaaagaagaaagttttgacagacagtggggcaagacacttgcacaaaacaggaagccagaggaatccttaaaacccacacatcatacaaaaataaagaaagaaaataaaacatgataaaagaaatgaaacccatacatcagatcacttactcctctgccttatacccttcaagagtttcctatgactttgggaataaaatccaaatcctcaccttggacaacagggccctgcaccatgtgttttccctccaccccctccacccccagctgtcacgtctctgacctggtttcccatcacttccctcatgctcattcccaccccacccccccagccacactggcctcctttcggtttctccatcacaccaagcttcgtatcgcctcagggcctttgcaaaaaatgtcccatctgccccgagtgttcctctcccagctcttccatggagagcacctacaggcctcggctcaaatgtcaccccttcaaggacatttccctgctgcccccagcacagattaccctattctatcatccaattctatttccttccgaaagcgtgccccacattacctcctatattactgtagagactgtactagtgtctcacccctccccacaactacaatgtcaatttcatgaaggcaagaaccatgtctgcctttaaaaaaaaaaaaaatcagggtctcactctgtcccacaggctagagtgcagtggcacaatctaggctcactgcagctttgatctcctgggctcaagtgatcctctgacctcagcttcctgagtagctggaactaaaggcatgcactaccacatctggctaatttttgtatttttttgtagagatcaggtgtcaccatgttacccaggctggtcttgaactcctgagctcaagcaatccacctgccttggtctcccaccaagtgctgggatcataggcatgagccaacacacccagccacaatgcctgtcttgtgatgctctatccccaaccatccatggagagatgaaaatgcatgatctggttgttaccttgcactcagctgcctaatccaagagacatgcaggtgactttgagaaggctggggctgtcctgggcccacagaattcagacagaagacactggggaaaggagaggaggtgggacagggaccagacacagagcactggaaaggagaggatgtgcaggagcaagagctgagccggattttccagacggcggcagactctggggggctgcctggacttggggcattttttctgggctggccctggacttagagaatatttttgtgatttagcggccccaatttttgtgaaatgtcctctgctgactgagagattaacctgctttgactgggccatgctaaaaaatgaacaggaatttgatatagtccagtgtggaggtggagagggagggaggtgaagaaagaacagaaggaaggggtaagacacactgaggagcagatggaagttacctgaggggatcctccaaagaagaaagggtgggctatgcaaacagtggatgtaaaaagacgcctggaagaagttaggacttggatttctaggagagattaattcgacttgtaggagcagggatttggggagaggcagagggctctgctgcctctgaaagagctcaccgagtgcgctccctctctctgactaaggacccctgtggataagaaagctctctgccctagagaagaagagcagtcaaggtgcttacaggctctttcccgaagactgaagacctttcccagggtggactgtggtgcccttccctgtgcaggcaccctgaccactgtgtgttcagagaagagggatgtggcacacacacctgagaagcactgggactcctgcgagaccaagtgggaggttgccactcctggggaccatctgatgggaagcagcggtgaagaaaagggaatggcgtctggatgtggatggaggcaggtgcttctactgctgcccggccagagaggagcatccccagagggtccgtccctagccaggctggaagcttgtctctgcgcatctggtcccctctcgaagcagttctcaaaagccgttgagacacactgctgggatgtggcaacacaccaagaggcaagaaatgtaagtccatggttcctggtaatactgaaaaaactaggctttggaagtttaagtaaacaaagaaatgagaggatataaggtaagctgttacaacgtcactgtcagttatgagtattctgttatgctttcttttgagccagtctcgctcttttgcccaggctagagtacagtggcatgatctcggctcactgcaacctttgcctcccgggttcaagcgattctcctgcctcagcctcctgagtcactgggattacacatgcccgccaccacacccagctaaatttttttgtattttagtacagacagggtttcaccatgttgcccagggtggtctcaaactcctgagctcaggcaatccgcccacctcagcctcgcaaagtgctaggattacaggtgtgggccatcatgcctggcccccattacactttctagagagaggaagaagtactaacctcacagtgcagactggagactgcacagcacatgcgcagatggtcttgacagaggatgcctccctctgtgctggggaactcatccttgcccattcagtttccgtggctcaagcaggctgatgtcagcccttggcgatgctgttggcgtgtgtgacccacaaatcattcagaggcagcagagccagcctggagatccgggctgtgacttcaggacaggagaccctctctctgcacaggttattatcctaaactgccaaaggtcactgcgtgaagcaattttactaagagccaccaaacccctctcttccctccaaccaagttcattcacccttctcagaagagcccaagagacctctgtgagagtaagacaggagttggcgatggtgcaatttgcagaacgccatgtttgttagcgccttgtcttcatgtggccggagggcactcctgaagcttcaaactcctgtaaaaacgcttcctgtccagggagggtggtatgggaagtctgaggtggctgggagaggaactggcgaagtaaggagttggagcaggagtcagagagacatgggatggggaaactcacaagcagactccaccccagtcagggaacctcactcaccgttccattaagggctggaaaaggaggcaccgacaggtgtctcacagaagcgaatggtagctgttcaggaggctggacccaggaaaaaggacataaaatcggggaggtgcctcaccctaatttttctcaactccagcagaaccttcttagagagcctcactcaattccacatttctcctcctctcagacaagcccggcagctccgtccacgtcctttgctgaatggagccagcgtggtcacttctgccctatcgaggaagctgaaggccctggcccatctctgacagctcagggcacaggaaagccttgcctctgcctagtctgccctctgcttccccaccagcgtcatctgtggcccacggctcttggctggacctgcactgaaggacacagctgctccgagctacacaacagggtggctgtccctccgccctccatgtgtggtggctgctgcagcaggatacagccagcctcctggctgctatcccacagtgctatggttgattgcgttcttacactggaagataaacagtgcttgtgtcaaagaaaatagaaacaaggccgagcatggtggctcatgcctgtaatcccagcactttgggaggcggaggtgggcagatcacttgaggtcaggagtttgagatcagcctgtccaacatggcgaaaccccatctctactaaaaatataaaaattagctgggtgtgttggcatgcgcctgtaaccccagctactcgggaggcagaagcagaagaattgcttgaaaccgggaggcagaggttgtagtgagccaagatcgcaccactgcactccagcctgggagtgctcatatgagcactcactctacagagaccctgtctcacaaaaataaataaataaataaataaataaaataaatagataaaaaaaagaggtagaagctggaaaagtggttatcttaggagtggaaggtttgctgactgagagggaataaaagggcctctagggtgctgaaaatggcctgcatctcaacctgggtggtcatacacaaatgtacagatatgttaacatgcatccagctgtatccctaagttgagctcacctttttgtatgtatgttacctgttaataacacaattgataaaagccccctctaaaatcccacatcttcctatggctaccatagatattttaggcttataattggttttgctccccatatttgctattcaagatctgtataattttggaactctcccctttttccttgccaacagggtcccaattttgttaggttcgggaagtgcccaattaatactcatttgcccaaactctcttgcggctaggaattgccatgagatacaatgtcagccagttggaaataagtacacatctgctgggtagggcttccagaaaagctatcattttcctttttccttctttagagacaaggtctcgctgtgtggcccaggctggagtacagtggtgccatcacagctcactgcagcctcccattcccaggctcaagcgatcctcccacctcagcctcccaagtagctggaactataagagtgcaccaccacacccaactagattttttttttattttttgtagagatagggggtctcactctgttgcccaggcaggtctcgaacccttggcctcaagcgatcctcttgcctcggcctctcaaagtgctggaattacaggcgtgagccactgcatctagaaaagttgtcattttcctgcttgaaaaagggatagatccatctctcatacgtcttttgctctctgtcctccctgccccctgtttttctgctcagaatgtagatgcttcttaggaccatgaagcgaaagccaagatctggggatagtgaaacagatagccagaggaccccaggctgtggatggatgagtgatcctgagcagcagccgtggacatgggttccctaattccttcatgtcccatgagaaaaataaacctctatgtgtttaagtctctgttatttgggcatatttgacagtcctcaaatgagatataagggttttatcttcataaatggcaaagacttctagagacagaagggaaggcttctgggtgctaattcactgtggcttcatatcatcaagtagcaagggctcaaggaaaaaaaaaagtgggggaaggaatccccaagacattcccaaaattaagactacattctcccctcccaccttctcctgagagcagtcttccctgcttcctatggaatctgaattcttctggcattggaaaaggctcagggaagatggctcaacgtgaagaggatctcagttcacgtaaactttaccaagagcgggtcttagagtgttatgtccactgcatcactgtttctcaatctatttttaaccacttcccacttctgataaacagaaactttactttctggtttgcattaagaaaaccagggcttttctctctctcttggaaaatttccaagcattttgaaacgtgctgccaactccccgggtgtgacacccgggagtttctgatatcctccctgcacttcctgaaaatctgccgtctaatttaagtttcctaagattctgcaaagcagacagaaaccctggtgactccagcgataccacaactcttaggggaagatgagtcatgtatgtggcagaagcaggtaatggaggaaaacagagacaaggttgggctggggaaaggaacacagagcaactagttttgccccccatctggtgtgtcttttgcaggatcagccagcacctgactgcaagtttccgcctccagacactctgctgcctctcctccctggctcagggtcagcactgaaaatcagcccaaggaaacgaccagctgccttctggcccttatcaagggtggtgtgaacccgcgctagctacccaggggtctggcccggaagcggcagggggagggctttttagtcctgtgtctagtccagtggtcacctctgcacggacagcagatggagaagggggctcggggaaggaggaaaaggtcaggcaacctctccaggattcctggaataaacattcctcctcccaagctcttcattctgtttcacaatcaaatccagagtcttataagcattcatggaaaccatgaaagcaaacaacttggtaaacggtagacagaaacagtaaatagaatcttccctctacttcctgtgtatccagaatgtttagagacagggagtggggactgacgacagattgcagcatctgggatctggggctatggcaggaacgaggacatgtggaaggctgggagttgcctgggtcttgggagtctggggttgaaggttactccttcatggtttcagggaaagagtgaagaccactggcaagaagcctggtaaccacacagacacaccctgcaggaagcagttgacaccatctcacaccctgacctgtcccccatgtcctcctctgtgggatgcacaggacttccaggggccaccaaagaagttgggtctaaccggggccctcacagtacagtggcgagtgtagtgcggtggtaaagaccatggactccagccgggcgcgggggctcacgcctgtaatccccacactctggaaggccaaggtgtgcagatcgcttgagtccaaaagttcaagaccagcctgggcacatggtgaaaccccgtctctacaaaaaatacaagcattagccgggcatggtggcgcactgtaatcttgtaatcccagctactcgggaggctgaagtgggaggatttctgaagtcgcaggtttcagtgagccaagatagtgccactgtactccagcctgggtgacagagtgagaccctgtctaaaaaaaaaaaaaaaaaattagccaggcatgctggcgtgcacctgtaattccagctactccagaggctgaggcaggagaatcacttgagcgtgggaggcagagatttcagtaagccatgattgtgcccctgcactccagcctgggcaacagagcgagaccctgtctaaaaaaataaaaaataaaaaaagcccatggactttttagttcagagttcagttcctccgtccaccagatgcatgactccaggcaaatcacttctttctctacatacttcagcttcctcgtccgttaaaggggatgagtgtgtaacttcctaggatgttttaagatttacatgagttcatctttgcaaagctttttgcatggcacttgatacacagtgtcatacaatacaataaatgttggctgccatgtctgctatgtcctctgtctgttgtaatgaattgccaaaaacttggtggcttaacataacagaaatttattctctcacagtactgaagactagaagtccaaaaccagtgtcacggggctgaaatcaaggtgcagggtctcctaattttccctcctttttcctctgtcctgaccaagaaacagagtgccttgaccaacctgcgacccagccagctgcgtgttttctctgcagacttgaacccaagccagggcttgaacattcccaggcactgataaaggtgtttagacactgaaagaaaccagccctggccctgggccaaattccttaaaccctcatgcaaacccctcccttgccccctcccttttctctcattgttcgtcttgaggatgctgcagcccactctgcaaattcccctccgaaatgctttgcactaatcaccctggcatttggtgcttcttgctttgggaacccatctggccccctcttgggatggtttggggaactcctcgacagaaactcccttgccacagcttttcggggtgactccagccagatccggctgggatggaacacaggtgttcagcaggattccatttctccggaggctcttgagaaaatccattctttgcctcttccagcttctggtgggcgctagcttgcagctacatcactccggtcctccaggatcacagcatcttctccccttctgtctgatttctccctctacctctttctttttgtgattacatttaggaccatctcagatagtccaagattatctccccatctaaagattctttttttttttttgagacggagtctcactctgttgccaggctagagtgcagtggcacgatctctgctcactgcagcctccacttcccgtattcaagtgattctcctgcctcagcctctggagtagctgggattacaggattacagatgcacaccaccatgcctggctaagtttttggatttttaatagagatgagacggggttttgccatattggccaggctggtctcgaactcctggcctcaagtgatctgcctgcctcggcctcccaaagtgctgggaacacaggtgtgagccaatgcgcccagttctgcctcctcctttttgtgattatgtttagggccatctcagatagtccaagatgacctccccatctcaagcttcttaatcccaatgcaaagtcccttttggccgtggttccagggattaggatatgggtctcttttggggggaccatcatttggccaccacagctggtgtgattggccaggagtgaagtctaataaacaggactcaggtggacggagagtggaggaaggagaggtctctgcagagagaggttggggtatggctaccggcagtgggtgggaacaaccacagaggcccaccaccaaggccacagagacagagtctgcagagttctcccaagaagctagccttgagacgctccttttaattttcttcttcagcaatgtaccagcccggggatgggttctgcagggactgtggaagtgaaggaccccacgactggagtgacaggggaggctgcataatagacaactaaaagagaagatgcacggaggggggtgggcataaactgttaccttcacagtgggtgagctcctctggtgaggcctctgcagggctcaaaaaaggtgatacgcaaatgaactcaggggaactgcactggcacaggggccattacgtctcaaagtccatcagcacgtgctggtctagattctccttccctcttcatccctaggagagttccatttctctctggcatcctgtacttccttattaattgtcatttatttaaaattgcacactgggtgcaatggcccacacctgtaatcccagcacttagggaggccaaagcaggagaatcgcttgaggccaggtgtttgagaccagcctgagaaacacagcaagaccctgtctctacaaaaaatagcaaattagccaagtgtggtggccaagcccgtagtctcagctacttgggaggccgaggtgggaggaccgctggagcccaggaggtcgaggctggagtgagctatgatcacaccactgcactccagcctgaagtgacagagcgagacccccacctctaaaaataataataatcagcccagacgtggtggttcacacctgtaatcccagcactttgggaagccaaggtgagagtatggcttgaggccaggagtttgagaccagcctgggcaacataacaagaccccatctctaccaaaaataaaaataataaaaacatttagaaataataataataaaacaaagttacatatctcaaatcctaagtgatcctctctgccccgggtgcacattctcccttatccatgccatcctcaatcccctcaacccctggcgactgcaacaccctcctagcggatccctctgcttccagttctgtccttctagggagcattcttcacacagtagcaggcttgatcttctagaatcatatatcacatcacatcattcccctcttatggccctaagtgacttcccactgctcaaaaatggagtcttaaggccgggtgcagtggctcacacctgtaatcccagcatttgggaggctggcaattgtttcattcattcattcatttaacaaatatatatccaccccccaggatgtgccaggatctgtgccaagcattagaaatatcatggttgaaaaatacagatgggtccaggcgcagaggctgacgcctgtaatcccagcattttgggaggccgaggcaggcggttcacctgaggtcaggagttcaagaccagcctggccaacatggtgaaaccccgtctctactaaaaatacaaaaattagcagggcatggtgacagacacctgtaatcccagctactcaagaggctgagacgggaaaatcaattaaacccaggaggcagaggttgcaatgagccaagatcacgccactatgctccagcctggatgacagagcaagactccgtctcaaaaaaaaaaaaaaaggtatatagcctggatcatcagtgctgaccatgaggaaaaaggtcctgtggcttttgctgcaagtcccttaaaccacaagacagctctcaagtgattacacgtccaggatgtcttaacaggtcccagaaaaagataaatgaggcatctgaggacaagcgtcctctgagtttttgaaatggacttatctccattctgaagtcactctcatccatctatcctccactgtcatccaggaaatagttactaagggcctaacatgttccaggctgcacgccaggtcctgaggatgcaatggtgagcaaagcagctgtgttccctgctttgtggacagtctcataaggggaggtagacttcacatccatcttaatgcaaatcctcatgctaatgaacacattataataaattgagacgtgggacataggaaggaatagtaaaagatgctatgagagcaaccaacaatgagaaaataaactctaaaaaaattaaatttacagctgcctccaaaatatttagaatcatgcaaaacctctatgctgacaactagaaagcattgctgagaggaattaaagacctaaataaatggagagagatgtccagtgtcaatgatcccaaattgatctatggattcagtgtgagcccattcaaaattccagcaggcttttctgtagaaattgattttaatatttatatgaacatgcaaatgacccagaatagccacagcaaatttagaaaagaagaaggaagttggaggacttactctatttcaagacttattatgaaaccacagtaatcaagactgtgtgcaggccgggcacagtggttcgtgcctgtaatcccagcacttcgggaggccggggcacgtggatcacttgaggtcaggagttgaagacttgcctggccaacatggcgaaaccctgtctctaatacaaatacaaaaattagccgggggtggtggcaagcatctgtaatcccagctactcaggaggctgagacagaagaattgctggaacccaggaggaggagggttcagtgagctgagatcacgccacaacactgtagcctgggagacagagcaagactccatctaaaaataaaaattttaaaaaataataaaaataaataaattttaaaaataccgtgtgcaaatgatgaaaggcaagacacagagtctctcagaagaatagagcgtccagaaatagtaccacacacacatacaaccaatgggtttttagtacaggtgccgcggcaattcaacagggaaaggaaaatctggaataattggataaggaggtaaaagcttcttaggacataaaagcacaaaccatagaagaaaaaccagataaattagaccttgtcaaaatgtaacacttttttgcttttcaagagacaattaagaaaatgaagaccaggcacagtggctcatgcctgtaatcccagcactttgggaggccgaggtgggcagactgcttgagctcaggaggtcgatgccagcttggacaaaatggcaaaacctcatcagtacaaaaaatagaaaaattagtcaggcatggtggcaggtgcctgcagtcccagctacttggagggctgaggcggaaaggtcacctgagcctgggaggtcaaggctgcaatgagctgtgatggagccactgcactccagcctgggcaacaaagtgaaactctgtctcaaaaaaaaaaaaaattaaaagaagagaaaagtcacagaatggcagaaaatattggtaatatatacatctgacaaatgactagtaccaagaatataataaagaactctcagaactcaactatatgaaaataatccaatttttcttttttttttttttttttttgagacagagtttcactctgttgcccaggctggagtgcagtagtatgatcttggctcactgcaacctctgcctcctgggttcaagcgatcctcctgcctcagcctccctagtagctgggattacaggcgcccgccaccacgcccagctaaattttgtatttttagtagagatgaggtttcactatgttggccaggctggtctgaaactcctgacctcaagcaatccacccacttcagcctccaaaaatgctaggattacaggtgtgagccaccatgcccagcctaaaattttttaaatgagcaaaatatttaaacagacattccacgaaagaagatatacaaatggctcataagtacttgaaaaaatgcttaacaccaataatcatcaagaaagtataaattaagaccacaacaaaggccgggtacggtggtccacgcctgtaatcccagcactttgggcagctgaggcgggcagatcacctgaggtcaggagttcaagaccagtctggccaacatggcaaaaccccatctgtattaaaaatacaaaaattagccaggtgtggtggcacgtgcctgtaatcccagctactcagggggctgaggcacgagaatggcttgaacccaggaggtgaagtttgcagtgagtggagatggcgccactgcactccagcctgggcgacagatcgagactctgtctcacacacacacacaaaaataccatggcatacttattagaatgcccacaattaaaaactaacaattgtcaagtgttggtgaggatgtggagcaactgaaatgctcgtaggctgctggtgggaatgcaacatggcacagctactttggaaaactggtagtttcttaaaaagttaataaaacgttttaccataccacctggccaatacactgccaggtatttgcccaacagcactgaaaacatttccacacaagaatgttcttaacagctgtattcatactagacaaaaactttttaaaaaaaacccaaaccaaccaaatatccatcaacagatgaatggataaataaaataggaaatatccttaaaacagaatactattcagcaatagaaaagatgcttaacctgtaagaggggaatcgaaatctaggaggtcagggccttttttttttttttttttttttttgagacagagtcttgctctgtcgcccaggctggaatgcagtggcgcaatcttggctcactgcaacctccgcctcctgggttcaagtgattctcctgcttcagcctcctgactagctgggattacaggcgtgcgccactatcccggctaatttttgtatatttagtagagacgggatttcgccatgttggccaggctggtctcgaactccttacctcaggtaatccacctgcctcggcctcccaaagtgctgggattacaggtgtgaaccactgtgcccagccagacagggatttcttaaggaagtaaatggttatctgaaagaaagctacaaattaactgtgaaagttggaatgggtaacaagaaataaagacataccaggcaggggctggttcaagctccccatggcagatggaaaacatgacacattcacagaagtggaaaatggccctgcccagacagcaaagagagagaagagtgatgtgagtggaagctggcaagggccatgctaggcaggcctttttaaggatgttgatatttctcctaaaagcagtgagaagtctctgaaaggacaagaaggtcgtataattggattgacatttttaaaatgattccactaatacagtatggagaactgactgccagggaagcagatggatgagaggaagtgagtcagggccctgctgaaatcctggtagggatgatggcactgagatgggatgatggagatggagacggatggatggattcatatttggaatccataagtatttggggagtacatcagactgcattctagggataaggaagaagataatattgagattcactttaagactgactctagtcaggctcagtggctcacgcctataatcccagcactttgggaggccaaggcgggcgaatcacttgaggtcaggagttcgagaccagcctgaccaacatggtgaaaccccgtttctactaaaaatacaaaaattagccgagtgtggtggcacatgcctgtaatcccagctactcgggaggctgaggcatgagaattgcttgaatctgggaggcagaggtggcagtgagccgagactatgtgccactgcactccagcctgggcgacagagtgagattcagtctcgaaattaaaaagaaaaaaaaaaaagactgactctaagataatggtgcaggagatgtgatgggaagagatcttacgccccaagacagggaagggtggaagaaggaagatctgaggccaggtctggacacatttgatttggttgatttgggacacctgtgagacacccaatggcagtgtcaactaggcagttgagcgtgtacatgtgaagctcacagaaacctagggtgaagattcaaaccaggggtgtcatgaaggtggtaactggaactacggaaacagttgcagtcgactagaaggagagcacaggcgagaacaggaaagaacctggagccaagcttgaaggaagtcaccatttcggggatgagtaggggaatggtgagctagcaaaggggtacgagaagtgaccaaaggaaagagagggaagctagcagcgtaacgtatcagaatttgtgaaaagaggatgtttccagaagggcgtggaaattgtgttgaatgctaataaaataagaaaagcgtaagtccactgaatttaggaacatggaggtcactgctaacatcgggaagagaaaatcccatggaaaataggcacagaacccagattagggtggactgaggggcgagtgagaattaagaatgtggaagtgattacacagaactttagataagggtccaacttcctgtgatgacaggctgcattataaagacgatgagagaaaactgaacttggaaggaactgtgaaggatattgctcttgtgaaagtttacccccttgaactcggtctgagaggttgggtttccttttcctgtgacgtaggtggacatcatgaactgtgagactgaaagcctccttggtgatgctcccttcataactgcggtgaacattcataactgctgtgaacccagagagggggtttcgttggggcgtcttccacagggggactcacgacagtgacggcgaaaggcaggaggtggggggagaagaacgtgcagagacagagaggcagtcccactcctcaacacttgttttccaatgagtttcctggattctgcaattaaatccagatcctcgtgcatgtttataggaaatcataaaagcgaaatgacacaaataaatttggtggcaacaagagagaatggtctctttcttagttctcctgttgatctgagaagcgacgtgtgctgggggaaggaaataaagaactagaacgccttcagaggagagtagagtggacgagaaagaaaagctaaatatcaaaatgtctagaccctggggttacagaccacaaaaagaataaatgactgactgactgaatgactgaatgaatggcaaacaataggaagtaggtatgtcctagggaaagaatggggattctgtgagcaggaatcaggccacagatggcagaacagagacttctttctgagacttcctccctagttcaagaggaaaacacgttccaacgatccttgctgcattaggtgtgtatttcaaagggaccttcaggagctcctaacctggggctaccaaggtcagagagggggaaacagtgagactttatcagggaaaggaatggagcctgagtgccactccctgacgaaaagccacatgggcacgtgaactcgggcctcctgaattcctgacactttcccaagagggacagcacatccatgccctgagcctctggaggctgcaccaagtggctcactctctgtgaagctgcgttacaggcttgagacgaggcagcacttacgggcatctgctaagtgctttatatacacaacctcactgaatcctcgcagaagtcctaggatgtcagaattcgcatgctcacttgactacagcaaactagacttcagaaaacggatctgcccccaaggttgtaatgaagggacctggatttgagcccatatctgcatgactataactcccacaccatttccatcacaacaagatgcaggccaggaccagcctgtttcagctgagacgggcaaaagaaatgtgttgggggcagagggcaggagaccatagagaaagtaaaaaaattgaagaagaaaaggaaggagtgccgggtgcagtggctcacgcctgtaatcgcagcactttgggaggccaaggcaggcggatcacttgaggtcaggagtgcaagaccagccaacatggtgaaaccctgtctctactaaaaatacagaaattagctgggcgtggtggcaggtgcctgtcatcccagggaggctgacgcaggagaatcgcttggactcgggaggcagaggttgcagtgagctgagatggcgccactgcactccagcctagacaacagagcaagattcagcctcgaaaaaaaaaaccaaaaaaaaagaggaaaaataaaaaggaaggaggaaagctcatttctgagaatgagcagaatgacagaagaaactgcctaagaaagagaaaagaaaataatctgacttgggaagtaaaaaaagaaaaatgcctgggaattttttttttaaatcaggaattaaggacagaaaaatctgaatttggaagtcaagagtgaggattctctagggagagaataaagatgctgggcctttcctttgggtttgagaggaaatagtgcttaaagactgaccttcctttctctggtcacgtggctggtgctagtataaatgcttactaccagccaggttcctcaccattttttcctgcatggcatggacagaagcaggggctaaagctctgttcctctctcctggaagcttgcagacctcccttcagaaccaatcccaagaagccacctatccggaacaacacaaggcaaggcagctagtgtagtgcttgtgctctgggaagagaggccaggatcaggtttgaggggaaggttctgggagactggaggaaggatgtcagaaccaaatggaagactcatacccagagacaggagctagtgtgaggagcaaggaaacagccaggaaatcaaggctggagagtggacagagggacaggacctgggttggggccagcaagggtgacaccccaagtggaaactgagttaccccgtgaagaagacgagttctatttatggtcagaatgccacgctcaagggccagtgaaggcctgtgggcttttctgaatatttctctaaggtcttctagggacaagccttcctcctaaggctagtgctggttcatccttcttcccctccaccctcctctaagcctcccagcttccccttttcttttctttttttttttttttagacggagtttttgctcttaccgcccagggtggagtgcaatggcgcaatcttgactcactgcaacctctgcttcccggttcaagcgattctcctgcctcagcctaccaagtagctgggattacaggtgcccgccatatcacccggctaattttttttttttttagtggagatggggtttcaccacgttggccaggcttgtttcgaactcctgacttcaggtgatctgcccgcctcggcctcccaaagtgctgggattacagaagtgagccactgcgcccagccccagcttccccttttctagagagtcccagagtttggtgttggacaggagaggacaaggtgggggagaatctgtgctctgcaaaacagacgaacggaagtaggaagctgggctggtggctgggcacttgggtcctttggagagctggcactgggtatccgcgcctggggcgccacagcctctttatactgataagcatcttacagctctctcccggcactgatgcctttctctcctgcaggtctctgtctgagaaagggacttgagtaaagttagaaactggcaacagtaacttcctgtatctgtgaggacaggaggagaaaggctagggaaactggagggggaattcccttgggaagccacgagttggtctcctccagagacacatgatggcaaacataatcactactgcttaatatcccgccccaggcaaagtcaataattgctctgggtagttcgagcaggtggtgtgagcaagccgtggtggcatcagaaagcacagtcctgggaaggggacggtgccggggaggatgtccgcatcctgaaggagagctggctgcgcgggctgtgagtgagacctccctgaccccgcccttttttgttcccctccaggatgctgccggactggaagagctccttgatcctcatggcttacatcatcatcttcctcactggcctccctgccaacctcctggccctgcgggcctttgtggggcggatccgccagccccagcctgcacctgtgcacatcctcctgctgagcctgacgctggccgacctcctcctgctgctgctgctgcccttcaagatcatcgaggctgcgtcgaacttccgctggtacctgcccaaggtcgtctgcgccctcacgagttttggcttctacagcagcatctactgcagcacgtggctcctggcgggcatcagcatcgagcgctacctgggagtggctttccccgtgcagtacaagctctcccgccggcctctgtatggagtgattgcagctctggtggcctgggttatgtcctttggtcactgcaccatcgtgatcatcgttcaatacttgaacacgactgagcaggtcagaagtggcaatgaaattacctgctacgagaacttcaccgataaccagttggacgtggtgctgcccgtgcggctggagctgtgcctggtgctcttcttcatccccatggcagtcaccatcttctgctactggcgttttgtgtggatcatgctctcccagccccttgtgggggcccagaggcggcgccgagccgtggggctggctgtggtgacgctgctcaatttcctggtgtgcttcggaccttacaacgtgtcccacctggtggggtatcaccagagaaaaagcccctggtggcggtcaatagccgtggtgttcagttcactcaacgccagtctggaccccctgctcttctatttctcttcttcagtggtgcgcagggcatttgggagagggctgcaggtgctgcggaatcagggctcctccctgttgggacgcagaggcaaagacacagcagaggggacaaatgaggacaggggtgtgggtcaaggagaagggatgccaagttcggacttcactacagagtagcagtttccctggaccttcagaggtcgcctgggttacacaggagctgggaagcctgggagaggcggagcaggaaggctcccatccagattcagaaatccttagacccagcccaggactgcgactttgaaaaaaatgcctttcaccagcttggtatcccttcctgactgaattgtcctactcaaaggagcataagtcagagatgcacgaagaagtagttaggtatagaagcacctgccgggtgtggtggctcatgcctataatcccagaactttgggaggctgaggcaggtggatcacttgaggtcgggagattgagaacatcctggtcaacatgggaaaaccccgtctctactaaaaatacaaaaaaattagctgggcatggtggcacatgcctataatcccagctactctggaggctgaggcaggagaatccttgaacccgggagttggaggttgcagtgagctgagatcacgccactgcactccagcctagcgacagagcaagactccatttaaaaaaaaaaaaaaaaaaaaaaagaagcaccttcaggctggagaagcagcgtagctaacacaagtccagtccttgtgatgtggctggtagttggggatggccaggctgaagcagagagtcctagagaaatctcgatacaagcttcaaagcaacacctagacactgctctagcggttgatcctggagataaaccaacaagagagagatggaagagaaatactaaatgaggtcaaagaagactcagaaaggttctgagcctggagatgagcagggaggcctcagggcttagacctttaatgataggggtttccctgcattggtttgacctgttgcctttttgatgtgctctgtttgttttcatgtgttgtcttgtctcccctgctaaactgggagctgccaggggtctgggtcttatctccttcctccatggtaccccacacaggccaggatgtggtttggtacccagcaatcagagattggcactccctcatacaggggaaagcaacctggtctagcaaattgaaaataaagatgataaaactctgaagtgaatgtccacaatttttgtaacactgctgcaagcacagggagggcaaaaataggagagagaaccagattcagcagcaaaggggaaaagtgatgcatctgaaaccacagaaacatcttaagataaagaggtggtgtgggcaaaggaagtgagagcactgacggaatcgtctttcgagggatgaatagagagtccggacttagaaaggatgcagggtgattccgattcacagtcatctgtctgccacagggccttaaaacatgtcaccctcctgctcagaaacctgcagagctttcctatcatcaaaatgtttccttggccagttgcaggggctcatgactgtaatcccagcactttgggaggctgaggtgggaggatcacttgagcccaggagttggagacccacctgggcaacacagtgagaccctgtctctcaattttaaaaatttaatttaaaaagatgcgtccggctgggcacagtggctcatgcctgtaatcccagcagtttgggaggccaaggcgggaggatcgcctgaggtcagaagttctagaccagcctggctaacatggtaaaaccccatctctactaaaaagacaaaaaaaattagccgggcatggtggtgcgtgcctgtaatcccagctactgaggaggctgaggcaggagaatcacttgaacctgggaggcagaggttgcagtgagccgagattgcgccactgcactccagcctgggcaacagagcgagactctgtctccaaaaaaaaaaaaaaaagtgcttcccccaaggaactcatattgtaccattcttttccttgctttgtcctctctctccccttccagttctacctgcctagctcatttttccacaataaggactcctagaccattctctctagttaaatgacctccagcccctaacctagtagtttgcaacccaggctgtacatcagaattacatgtggaggtgtgaaaataatacagagagccacctccaacctactgacagaatctctgcaggtggggccccagcaagagagcttttcaaaaaagcaccccaggtggccagctggggtcgcgaatcgctgtcttatctcagaagccaaatctgtccaagaacttgttcttcaaaaaccttgcctgcttattcatcccccctcacctcaatcccacattcttctacctgtttttttgttggtttgtttgtttttagagttggggtctcactctgttgcccaagctggagtgcagtggcacaatcatggctcactgcaacctcgaactcctgggctcaagtcaccctcccgcctcagcctcccaagtagatgggactacaggtgtacaccaccacactcagctaattattttattttattttgtgtagagatggggtgttgcccagactggtcttgaactcctggcctcaagtgattctcctgccttggcctcccaaagtgttgggattacagatgtgagccaccacacctggccctcccccatcttctggtgcttgcctcttcttcacttacaaaaatccactcaatattcactttctccagaaaacctttccttattagtcccactgaactgaaagctcattttctattttcctccttcaaaagaagactggacaggtgccataagaaccctgaattcagtgtccattccacttactaaatggatggcctgaagcaagccacctcctccagcctctatttctaaatcatagtgattaggatactacatacctcccaagattattctgtggattaaaataagactctatgaataaaattgctgagaaatcatagaatattaagtagttctaagatataaatccatgtacacagatgtaccctcacttattagaaatataataagtaaacattaaaaatagtggaaataatgctgggcatggtggctcatgcctgtaatcccagcactttgggaggccgagatgggcagatcacttgagatcaggagttcaagatcagcctagccaacatggtgaaatcccatctctactaaaaatacaaaaaattagccaggcacggtggcaggcacctgtaatcccagctactcgggaggctgaggcatgggaatcgcttgaacctggaaggcagaggttgcagtgagctgagaacgtgccactgcactccagcctaggcaacagagagagaatgtctcaaaaaaaaaaaaaaatagaaataacatagtaggtagtcaactacggatagcatggcagtaatatgttttaaaaaatctgggattctcagctgactgtacatgcactatgagtctgtgatgtattacagctgccacaaaagct[131 bp omitted]cggtgaaaccccatctctactaaaaatacaaaaaattagctgggcatggtggcgtatgcctgtaatcccagctgtttgggaggctgaggcaggagaattgcttgaacccgggaggcggaggttgcagtgagccgagatcacgccattgcactccagcctgggcgacaagagcaaaactctgtctcaaaaataaaaagaaaagaaataatgtctagacaagttgatgatactgaggcagagcaggtgtgctaagtggggcttggcccatgagggttcttggttttgcccaggaaagaattcaagggctagccggtggtgaaagaaaacagctttgttgaagcagccctgttacagctccagccctgttgcagctccgtgactgctcctgcagagcagggctaccccacaggcagagagtagcagctcagggcagttttgcagtcatatttttgcctacttttaattgcacacaaattaaggggcagttaacacagaaatttctaaggaaagggtagtaacttttgggttgtcaggtcattgccatggaaaggggtggtaatgcccaggtgttgccatggccacagtaaacatggcactctggcgggcatgctttatgaaaagctgcttcaccctttccttgttttagctagtcctcaatttggtccaatgtccaaacaccacccctggggtcaagtccctcctcctacctccataacccccattccacttaggtctaatcagcagcaggttcagaactgagcaacacattctcttgtattttttttttttttttttttgagatggagtttcactctgtcacccaggctggagtgcagtcgcacaatctcagctcactgcaacctccacttcccaggttcaagcaattctcctgcctcagcctcccgagtagctgggattacaggtgcatgccaccacgcctggctaatttttgtatttttagtagagacggggtttcgctatgttgtccaggctggtcttgaactcctgacttcaagtgatccacccgcctcggcctcctaaagtgctgggattacaggcgtgagtcactacat[140 bp omitted]gtgaaaccccgtctctactaaaaatacaaaaaattagccgggcgtggtggcaggcgcctgtaatcccagctactcgggaggctgaggcaggagaattgcttgaacccgggaggcggaggttgcagtgagccgagatcgtgccactgcactccagcctgggcggcaacaagagcaaaactctgtttcaaaaaaaaaaaaaaggacactagctcaatgaatcaagcccagaaaaattaaccaaaatgttttggagatttaagactgtataacaatagtaatagccgtaataatagagcaaattaaataccaggcactgtgccaagaaggggcctgagagggttaaggtcacttttcaaggccaataggtggcagggagtttgaatccaggtctttctgagcctaaagtgcatgctgttttcactgacacatgagaaggaagtaagagaacactggctgggacaagataagatctttttttttttttttttttgaggcagagtctcgctctgttgcccaggctggagtacagtggtgcaatcttggctcactgcaacctccacttcccaggttcaagcaattctcatgcctcagcctcctgagtagctgggattacaggcgtccaccaccatccctggctagaagatacactctatgagccacacaggacagaacaaagaccacaggtggaagaggcacagagatacctttcaaatagttatggccatttcaatggaactgactatctcagcaaagaagtcactccccaatttccaggaatattcaagaaggtagcaaacatctatcctaggacactgaggaaactcacacaaatgagggctgaaccagtttaatgaccacttccaactctacgattcccaggttcttttttcttttccttttttttttttttttttttttgagatggagtcttgctctatcactcaggctggagtgcaatggcgggagtgcaatggcacgatctcggctcactgcaacctctacctccgaggttcaagcgattctcctgcctcggcctcctgagcagctgggactacaggtgtgcaccaccaagcccagctaatttttatattttcagtagagatgtggctcatgcctgtaatcccagcactttgggaggccgaggtgggcagattgtctgaggtcaggagtttgagacaagcctggccaacatggtgattctcaggttctttaggggcacgacttctcttactaaccaggaaagtacaaaatgaagtcattttgctgggcacggtggctcacacctgtaatcccagcactttgggagtccaaggcaggcagatcataaggtcaggagttcgagaccagcctgaccaacacagtgaaaccccatctctactaaaaatacaaaaattagccagttgtggtggcacgcgcctgtaatcccagctactcgggaggctgaggcaggagaatcgcttgaacccgggagtcggaggttgcagtgagccgagattgcaccactgcactccagcctgagtgacagagcgagactccgtataaaaaaaaaaaagagtcattttgttgtcatggggttataagaagatcgatcactggacctggtctaagactttcaaagtgaagctgtagctgctcacttacaagcatttgaccttcatcaagttacctgacatagcagcccatttcttcactgggaaatcagtcgatcacctgttcaacaaatatgtattcattaccaactccaggccagatacttttctagggtctagggatacagagcgtacaaaagacaagtatcttccctgttgggacttccattctggtaggggaacatagtttaaaaacaggtaaacaaatagatgagcaaggtgatttcagagtgtggcaaatggaaagtagttacaaaggaactgaaacaaggtcatgggagaaactataaggggaggttgaggaggtttagaagatcattctactctcttgcttcaaaccttcacctggcttccagaagctcttagaagctcattcaaactccttttagtgacctaaaatactttgcacggtcggtcttttcaggcagctgctagcccgatgaaaaccctgcgtgtttgcatagaagtctatggtttcttaactctcatgcacatggtctccttgatcctaacaaacattccccttcaggtcccttcaggtaggcacagctgccagaatgatattcttaaaatggaaatcagatcattccaatatcttgcttcaaatcctcgaatgacttctagaggctcttagaatacaaattcctttctgtgacctggaagcccctgctcagctcctcaacctcatcttctttcactctgtccccattgatagtattccagcccagaggttctcaatatgtggcctctgagccagcagctgctgcatcacctgggaacaagccacttgacacatcggcctgtttcttcatttggaagttgaatctcctaagttagtgatgttcagctgagccctgaacaatgaaagggagttgacatacaaaggcccgcaggaacattctggaaacagaaattgctgatgcaaaggctctgaggagagagaaaaccttagcatctctcaaggccagagagaaggccagtgaagggctcaaacaggggttttaaatgtaagcaaatattggaactacctgaagcgtttgctgaaccatagatgactgtcctcacttccccaggacttcagaatcagtagggatattggtcagggttctccagaaaacagaaccgagaggacagacagattacatagacagataagtagataggtagacagataatagattagagagatagagaaagagagagagagacagagacagagagataaagatacacaggtaggtagtaggtagacagataatagattagatagatagatagatagacagatagagatagatagatatacacaggtagctagtaggtagacagataatagattagatagatagatatgcacaggtaggtagtaggtagacagataacagagtagatagatgatagatagacagatagatagatgatagatagatagatagatatacacaggtaggtagtaggtagacagataatagattagatagatagatagatagatagatagatagatagatagatagatagatgatagatagatgggggaagggtaggaagccctgatctattgcatttgcaaatttctgtggcacatacactcccaccaggaatcattgctaccaatatgaagatcttgaacatgggtttggcaagagatgctaataatgggctcttattataatgtaatgagctcagacatatccctgcatgcaactcacagtacatctgctcaaatggcagccagatcacatcttccttgagaaaactttctctttccccaccaacgcttcatgcaagcctcttgcacagtgcttcctatacagtaaacactagttaaatgtggctggctgggcctgctccaaagcatccgggtggctgtatgattgcacagctcctctgaaccccctgccccaaagcaggatgacagatgggtaaacagaaatattagtgcctggttaatgaataacacagacggcagcctagtgccgctaccaggaaacaggggtggagggatctgacctggcccaacctgggggcctgagcagcacgaaaagggaacctggcattatttcacttcccctttctggaaaagatgctcctgggccccttcctcagaacttctcatcagtccgcacaaccagagctcaggtgcagtgtggcttggtgatgaatactatggttggaaaaggagggatgggggcagtgggcatggagagggtctggaggaaacacacagccatgattccagcctcactcccttaaacgtcctgcctctcagcgcggggtctgtgctagttcttcttttcgccttgccctgcctcctgtggataagtgcttttgccccacttttttttttccttttcattatttatctctaatcacaggaaatgaggacatttctcatctacaaattgcacatcccatcaggaaattgggccaaagatctctaagccttcagaagcggtcatccagtaacccacttggcaaagtttcaaaggtctgggaaagtagatgcgaggtcaagcagtgcgggaggggagccaactctgcaaacgctggccacggccagctggccaccagcagcttacccgaggaggggttgtccaagctacatactaaccccggttccctctccccaaacattgtcctctgccatctgtcagtccgagctacgaccagcctcgagaaaacagagttaggaaagtaaacacactgctcccaaatctagctattttaaataaaaagctcacccatgtgggctgcagttgagaatttctaaagtgccatggcaaacattacaccatttgagtttccacggcgtagccttcattcatccgccaacatttatggaggcctaccatgtgtcaggccctgttttaggtgctaaggatacagcagtgaacaaaaagggtaagattcctgccctcaagcagctcccattgctgggcagacagggagagcaagacccataagcaggatcctttgcactggtgctacgtgctgtgaagacgatagaaccgagctgggatagaacatgactcccaggaagggagtaggtggttacttttgaacacacagcttgagcttgagaaggccatgcaaaggtgatatttgagctgggactagaatggcaaggaggaatcttgtatgccaagaactgggggaataatgtcccaagcaaggggctccaggcctgtgcgaggcctgaacaggctgaatttgtgccgggaaaagaaacgccagggtggctgcagcttagtgacagctgaaaagccagcaagt[144 bp omitted]aaaaccccgtctctactaaaaatacaaaaaaattagccaggcgtggtggcacacacctataatcccagctactcaggggcaggagaatcacttgaacccgggaggcagaggttgcagtaagatgagatcgcaccactgtactccagtcttgcaacagagagagactccaaatcaaaaaaaaaaaaaaaagaagaagcgcaacagatatcctctccctacttaacaacaagaaaagctgaggctcagcgatgcaaagtggcaaagtggcaaagtgacacacgcaagtcctcagtgagatggtgttctggcccctcctccacgattcccgactccctctcaaaaccacaggcacactctctctcaatctttacttcactgaggaagagaaaagagggcaggaatcgtgactcatgcggtgtgcagttgtttggtatagaaagttggggagagtgatggagactgacctccatcgaggttctgagaaaggaaaggcatcgggggtggggtaagatgcctggtgctgagagcagagtagagaccagcaagaaacctggcttctaggaggagtcgtggctggggagaagaaggggcctgggctccaagaaagtgatgggaggccaaggagtcaccaagagccgtcccatgttgtcccgggtccactggcctgcaacagaaatgaaggtgtgaggacagaagcatagagctcgggggatgcgagcaggcctccagcctgcgtccacttctcaaccctggctgcgctccaaagccactggaggagtttccaaaactgccggtgtgtttgggcattgtattttctaaagctctccagttgcttgtgaagtagagtgagggttgagaagcagtgaatttagtcctggtcctctaggggacaagctgagggctctccaggaaggggcagcagggtgtactgagtttgaatcctgtcctagcgctgtgcaactcaaccttgctgcgctttcgttttctcacgagaattttttttttttctttgagacggagtctcgctctgtcgcccaggctggagtagagtggcatcatctcagctcactgcaacctccgtctccccggttcaagcaattcttgtgcctcgccctcctaagtagctgggattacaggcatgcgccaccactcccagctaatttttgtatttttagtagagacgggctttcac[140 bp omitted]ggctcacacctgtaatcctaacaccttgggaggccaaggtagaaggatcacttgagaccaggtgtttgagaccagcctgggcaacagagtaagaccccatctctaaataaataaataaataaataaataaataaataaataaataaataaataaatatagttgattttaaaaaagaaaaagaaaaaaatgaaattattaaataaaataaattagccaggcatggtggcacacacctgtagtcccagctacttgggaggctgaggagggaggactgttggaacccaggaggtggaggctgcagtgagccactgtactccagcctgaatgacagagtgagaccctgacccaaaaaatatataagtaagaaataaaagaagaaaaaaatagggctaacagcacctacatcatcatgttattatgaggatgaaacgaatttcatattgtacctccaaagcacttagaaaagtgtctcgcactggagatgccaaatacatgtttaaccatggaaatgttttaaaactgtaattccattcttctgctcgaaggcctccagatacttctcatgatcctcagagtaaaatcccatgccttccccaaagccagcaaggcccctgatgcatctagcacttggctctcacccaacccagctcatccctactcccttcctccaagccctcctccagctcccttcactcttccttttttgttaccgacagctcactaagctccttctccttgtggttcccttttcgtggagccctcgttccccaggtactcatccagctgaatttcccctctttgaggctgcctgtgactcaaattttatttcctcaaaggacttccccctccaccactcctaagtggcttcccttttgacacattcacataatacctagttgctgacttcgctgggtgtatcattagctgatagcatctatttttgtctacttgttatttttatccgttagacttgcacatcccttaatgcatcaaatggttgactgtgaaaaacaacttccttcccctctctctccaccacagtcacttaccgcttcctggaggcagctgctgctacctcttgtcagcaaaatatttatccctccatgcctttaaggggcttgcttattttactgtatttcttcatttctcaatataaggtttcatctgttaaattattctgtggcagatgaagattatgctcttattcttttcccaatatgtacaacacccttcccgccctgtcttcccgatctgctcccattgtcactatgttagaaaatattcagtgtttgcataatcgtgactacatcgatgttaatgacattggagctctgtagtaaataacagctcctttttttttttttcttgagacagaatctcactctgtcacccaggctggagtgcagtggcacgatctcagctcactgcaacttccacctcccaggttcaagcaattctccctgcctaagcctcccgagtagctgggattacaggtgcccgccacctagcctgaataatttttatttttagtagagactgagtttcactgtgttagccaggatggtctcgatcttctgacctggtgatccgcctgcctcggcctcccaaagtgctgggattacaggtgtgagccaccgcgcccagccagttccttttttatcctgcacaactttcctcccaaaacccctggaattaataatcaccttattttttcatgtgtttagtctacatgtttaccacgaattcaaccccaaactctttgtcaatgttcttgtctcctctcaagaacttcaggggttttaggaggatacagatttcatctccctgaagaaatgtgtcttggaactttctgacctgttccagtctgcctgggtggtggtttatgccaggtgtatagctcatgcttgaagctcttttttttttcttttagatggagtctcgctctgttgcccaggctggagtgcagtggtttgatcttggctcactgcaacctctgcctcctgggttcaagcaattctgttgcctcagcttcccgagtagctgggattacaggtgcgtgccttcatgcccagctaatttttcttgtatttttagtagagacggggtttcaccatgttggtcttgaactcctggccccatgtgatccacccacctcggcctcccaaagtgctgggattacaggcattgagccaccgtgcccagccagctcacacctgaagctcttaagtggaaagcctctttgcttctctgctcttgtcttcctcttccttggtttacatccttaagcagcttctttatttactgctgggaataacgctccaaatcctaaggaaactgaacactcaaacaaaggattcttagccaagcaattttacttgcgcagaggggtgcttctccttggccagttgccatgagagcacacctgaacaaaggggcacgagagcctttattcctaatgcaagtcctgcccctgtaccctttccccattggccggagtcgggccatacaatctaaactagtcccagttggctaaacatttgaactttctttagataaggtgggcacgtaagggagagaggggaaaggggaaggggtgtctgcagtgagctagagagctagtcttctttccaaataaggaaaagaacgtgagctggtactaataacgcctggtactgtggcgtgtctgggcatggaacaaaggcagaaaggaaaaagaaggagcaaaaggaaaagggggtggggggatactatgaattaaagaataaaggattgatcggctatttgaagagaaacctcatcatagcccacatttacttattttattatttattaacttttttggagacagagtctcgctctgttgcccaggctggagtgtggtggtacaatcatggctcactgcggcctccatctcctgggcccagacaatcctcctgcccaatcccctaaaagcattgggatcacaggtgtcaccacacctggctattttgtttgttcgtttatagaaaggggagggtctcactatcctgcccagggctggtctcaaactcctgggctcaagtcatccttctgcctcggcctcccaaattgctgggattacaggcatgagccaccatgcccaaccctgacgcagcttctttagaaagtaaatgctttgaaatcccgcatgtcagaaaatgtctttatcccactctcatgtgtagttgatattgggctatgtatggaatattctgggttggcaatcattcttcttcagaacttgaaaggcattgccgcattgccttctagcgtccagtctggctgaaaattcccaagacatcctgactcctatcctttgtccatggcctgtctttttctctctggaagcctgcaggatccttacctttctcacaaggtatctaaaattccatccattgggcattcaatggactcttccagtctacaaaataatttccttccatttgggaagattctcttgaaacactttgtgatggtttccttgccttcattttctctcttctctccttctggaatccttgttatttgggggacactgcacctcttacacggccctctaattttcccttttttcccattttttctctccccattgttttgctttactttctgtgagattttcttatcttccagcccttctatttttcatttttgctatcacttttcatttctgagcacatttttattccttcttagcatgctgaccttgtttcatgattgcaatgtccactctgatttctctgaggaatcttcatctccctgctctaagatgccttttttggtgtcagttgctatattttatgttagaagttgtcatcatatatatggtaattcttggttgtctgctcacattgaagagaagggaagggactacttttttttagatacataaaacgtatataaaggcactatgacatgatgtctaaaccagaaaagaatggttgagtgccatggctcacacctgtaatctcagcactttgggaggccaaagctgaaggattgcttgagcccaggagatccatactagtctgggcaacatagtgagaccctgtatctaaaaaaaaaaaaaaattttttttttttttgagagggagttttgctcttgttgcccaggatggagggcaatgacgacgcgatctcggctcaccgcaacctccgcctcccgggttcaagcgatctcctgccttaacctcccaagtagctgggattacaggcatgcaccaccatgcccagctaattttgtatttttagtagagatggggtttctccatg[136 bp omitted]agtggtgcctgcctactcagcagtcccagctactcgggaggctgaggcaggaggatcacttagcccaggaggtcaaggctgcagtgagctatgatcacaccactgcactccagcctgggcaacaaagcaagatgctgtctctaagaataataagattttcagcctattttccttatgttagcttgtcctttgtcccatttccagaggaacctgttgccactagttcatgagctttatgtggattctacagtagaaacttcattgaatcttggtttttcccactattggcttatgatccaactttcacaggtctgctaagtcagtcaccagttaccattcattcatctgctgtccagctggcaaaattttggtggtattgtatcctcttatgttctccctgtacttacggggactcctttctaaaagatctctttactgtcactacagtgtgatttcaggaggcagcaaaaggagattcatggatttcacccaccgttattagccccaagtatttcctctttattgttattgtttgtttgcctgctaattgtctgtcttcccctcttgaatgtaagttccaggataactcatctactttggttattttgcttaggtttttgtttctttttttctttttttctttttttgagacgtagtttcactcttgtcacccaggctggagtgcaatggcatgatctcggctcactgcaacctccgcctcctgggttcaagcaattctcctgcctcagcctcctgaatagctgggattgcaggggtccgccaccacacctgggtaatttttgtatttttaatagaggcggggttcgccatgt[136 bp omitted]cccaggcaggaatgcaatgtcgcaatcacggctcactgcagctgcaaactcctgggcttaagtgatcctcctgcctgcctcaacctctcaagtagctgggtctattggtgcacaccatcaagcctggcttttttttttttttttttttttttttggtagagacagggtcatgctatgttgctcaggctagtctcgaacccctgcctgacctcaagtaatccttccatctcagcctcccaaagtgctgggatcgtagacctgagccactatgcccggccccattttgtacacctatccatccccagcagtcagaaccatgtttgacacagagtcagtgttaaacaaatgaatgaaccaatttgctagcaaaagaaacgtactactcgccatcagggaggtggtagcagactcaggtctcctaactttccgggcagtgtccttcctaccacagcatggttggggtatgggtaattttgctaattaatgatatcagacagattataaagtgcttcacctggtaccaaatggtttcagaaatcttatctcatttgatcctgacaacagcccatgggccagatggtaaaagaattattattggccctaatatagcaatgatccctgacaggaactatcctgtaccatagaaatcaccgtcgctgctcctgacctctcacccatgtccactgtcatttatctgggcccttccatcacctcctctgcagacaggactgttaaggcttgtcacctctcaagcacttggtccccaagaatccaggactagctccttcataaagagggaaacgggtacagacaggggtaagtcatataaggtccttggagcaaagaagacatctgagttttgtgatgttacaggagcagaaaaaagaagaaaagtggaactgtcagatcagtagcaccttagagaagagctggatggagaaggaaggagaaggggcttagatcctggaaggagagagaataagtcccagaactaagagcggtatgtatacggtggggagagaggtgggatgaaaataaccatttaccataaccatagattccctttttttaaaatgaaatgaaaaatatcctagaatataatcacaaagccagttaaaaaatattctacacaggccgggcgggatggctcatgcctgtgatcccagcactttgggaggccgaggcgggagaaccgcccgagctcagaagcttcacatggcaaaaccccatctctaccaaaaaatacaaaatattagccaggtgtggtggcgagcctgtggtcccagctactcgggaggctaaggtgggaggatcacttgagcctgggaggcggaggttgcagtgagccaagattgtgccactgcactccaacctgggtgacagtgacaccctgtctcaccaaaaataaaaataaaaaattctggacagcaggttctgtaaaaccataacattagctcctgggatctgcttagtttctggatagcctgaactctgccctaagaccccagggaaaagtgaaagtaggatgcatggccccttccagggaagcaagatgtgactcaaaagtcacaccaggtcccaagggtataggtcacagagataaaggctgtaaagcaccccacactttctcattgtgctacctgccatcctcctcagattctgcctgccacctcctgggcagataaggctactacccgcctgcaaaccctggcaggtccaagcaccactcaggctgctgtgcctctgtgatccacacccagacactggaaatcgcccagaagcagaaacttagggatgaggaagttggcaagggggggtcttttaaccttgcattaaatcaagatgagtctttgttttttgtttttttgagacagagtcttgctctgttgcccaggctggagtgcaacggcacaatctcggctcactgcaacctctgcctcccaggttcaagagattctcctgcctcagcctaccaagtagctaggattacaggtgcccaccaccacacccagctcatttttgtatttttagtagagacagcgtttcaccatgttggccaggctggtctcaaactcctgagctcaagtgatccaccctcctctgcctcccaaagtgctggaattacaggtgtgagccaccgtgcccggccttcagtatgagtcttggtacggaaagaggtctgaaacatcttatgaagctacaatagcagttgtagaagagaataaataaaacagtactgtctataatcttaaaatcagtatagttatgtgtcacttaacaatggggatatgttctgacaaatacaggcaattttgtcgttatgcaaacatcacagagtgtacttacacacacctagatgggatggcctactgcacacctaggctataatggtatggcctattgctcctatgctacaaaccatggtactgtactgaatattgcaggcaactggagcacaacagtatttgtgtatctcaacatagaaaaggtaatgcattgtgctatgatgttacagcagctacaatgtcagtaggtgacaggaatttttcagctccattctaatcatatgggaccaccattgtatatatacgcagtctgtcaatgaccagaacgttgttatgtggtgcatgactatatatatatataataatagcagctgagtgtttttgagaccttcatacatgtgagcacagagctaacctctctgcatgcaccgttcaatgaattcttaccaaagcacagggacataggtattgccatgacttttctttttacaaaaagggaaattggccaggcacatggctcatgcctgtaatcccaacacttggggaggatcactcgagcccaggagttcaagaccagcttgggcaacatggtgaaaccctgtctctacaaaatataaaaaagattagccaggcatggtggcatgtacctgtggtcccagctactcagaagactaaggtgggaggatggaggctacagcgagttgagatcgagtcactgcactccagcctgggcaacagactgagactttgtctccaaaaaacaaaacaaacaaacaaaaaaaaggaactgagacttagagcgattgtggaataacttgtcctatatctcacagcaaataagtggcagggcaggactagaacctggatctgtatgactccggagtctgaattctcagcctctgctaggaaagcatggatgtgtacacatgtacgtgaaattcgcaaaggctacgtgacagtcaacaatggttacttaggaaattgggaggagggaaggtaggtcaactttctttcttttttttttcattaaaaaatttgttttttagtgacagagtgagactgtcactaaaaaacagtctggagtgcagtggcacaatcataccttactgcagcctggaactcttgacctcaagcaattgttttgcctcagcctcccaaaatgctgggattacaggcatgagccactgcacccggcctcattttctgctttacataattctgtactgtttacatttttcccatgagcatatattatttcataataaacacataaagcctggttttaagttgattctgctgaggactaagctctgattttttatcctgcccaaattcctatctaaggggcccagagaatcgtgccctaaaaaccataaattctcatcagttgggttttatttaaccctatatatcgtgacttactttccagtcttactgtggcataacgttacttgataaagaagaaagtcaaaatattttactccaaaatcatattttgaagtggccctgcaaagctgtcctttgtggggaaaatttgcatctgtaaagaatctctatcaacatagctagatctttttcttccaggccctcccaatcctgaagagattaactaagagtctagcaccttttaaagatctgaataggaaacatttgtcatctattgtctctaagggcagccactgtaagacttcaaaagaaccttggtctccacaatcttttaacctgaacatatcctttctgtcaatcccaggtctttagacaaactcaatcaattgtcaaccagcaaatgtttaaatttacctatagcctggaagccctgccccactttgaattgtcccatctttctggaccaaaccaattaatttcttaaatgtatttgaggccaggcattgtggctcacgcctgtaatcccagcactttgcgaggccaaggcgggcagatcacgaggtcaggagattgagatcatcctggctaacatggcaaaaccccgtctctactaaaaatacaaaaaaaaaaaattagccaggtgtggtggcgggcgcctgtagtcccaactattcgggacgctggggcaggagaatggcgtgaacctaggaggcgaggcttgcagtgagccgagatcgcgccactgcactccagcccgggggacagagcgagactccgtctcaaaagaaaaaaaaaatgtatttgattgatgtttcatgcctacctaaaattataaaaccaagctgcaccctgaccaccttgggcaaatgttctcaggacctcctgggggctgtgtcacggggccatggtcactcataataaatctcttcaaaatattttacagtttgactcttttcatcaacactgttcaccaaacatacacagagaagaaaactcaaattactctagcgtttaggtcctgttaactgaccaactactgtgagctacactgagggctaagcacttcacgtccaggacgtcactgaatcctcacaactgggtctggagggagggtattttcattaactcccttcacagaggaggaccctgaggctcaggaatgtgaagtgacctccctaaggtcacataacaacttaggaactcaacttaggcctgactggttcctgagcccatgcgtgtagctacatcagtatgttagcggcgcaggaatgatgacaatgataataacagcagtttacgtgcttgctatgtggcagccctgtgcatttcatgtataatctcatcacatctccatggcaatccccgttttacagaagaggaaactgagcgtcagcagagagaagtcacttgtttgcccagggtcatccagcagaattgagactagaacccaaaccaccggcatccatccagtggctcaggccaaaatctcagtagccatccttgactcctccttcttcttcctccatatctaatccattggttctagttggcttcagttttcaaaatacatgttcacttctcactatctgactactgcaggccccatggaagccaccgccgtctctcttccaggccagtttgaaagacttcctactgaacgccctccctccattcctgcctcttgcccccaccccatccactctctacattgcagtcagagtgatctttttcaactcttttgctaaatatctctcctgcaacctttcttagggttttgggagacaattaagctctgcagagaatggtttgagtgattgttttcttgattttcccaaggatgctactagctaataccattacttactacagtaggagataacttaattcattacatgcaatggatgccttagagtcttagggcttaagtctaccgggaactgggtggagacagctgcaaaagtttcctgtcacatttcaaataccagtgaccatggcctacaaggcccctgtgacctgccacccaccacaccttgacctctgcaggtacatttccaactacccttttcccaagcacaagacctcttctccctacctcaatcatagaagtctcattgctgccttagagcttttgcaggggttgttcccacaaccttgagccctgcccaagccatccagagcctgctccttttgtcagtcattcagggctcagttcaaagaccaccagctcagaggggccctctcggccacctgaattaaatgctgccaattcctgctgttttatttcctttatggcacttatttatcataatctgaaagtacctttgcttgttcactcaactgttgtgtgtctcccaagttaaggctgagctccatggggcagaaaccttttcacagggaagcaatctgtaaaaatatgtttagagaatccatcagatatctattatgagccagtcactgggttaggagctttgcaatgaatcctttttatcaaccccaacattgtccaatagatatacaatataagccaaggccaggcacagtggctcatgcctgtaatcccagcaatttgggaggttgaggcaagaatgacccttgaggtcaccagttcgagatcagcctggacaacatagcaagactctgtctctacaaaaattaaaaggggccgggggtggtggctcacgcctgtaatcccagcaatctgggaggccaaagcaggtggatcacctgaagtcaggagtttgagaccagcctgaccaacatggtgaaaccccatctttactaaaaatacaaacattagctgggcgtggtggctggcgctcgtaatctcagctactcaggaggctgagacaggagaatcacttgaacccaggaggtggaggttacagtgagcagagatggtaccattgcactccagcctgggtgtcaagagcgaaactctgtctcaaaaaaataaaaaaaaataaaataactttaaaaaattaaaagaaagaaatgtaatgtaagctattttttaaaaaatccaagcctcttggattcaagcgattctcctgcctcagcctcccgagtagctccaggcaccatttaaaaatttttaattgtctaataatcaaattaaaagaagtaaaaagaaacagacgaaattaatatattttatttaaaccaacatgttcagaggattatcatcccaacatgtaattggttaataaagatatgaatagatgacagatggatggattggggtgtgtatgtgtgcatgtgagctcctcctctataccttttctgggttctgagaagctcagcggcttcgtcgctattcggggactcacgggcttgcccttcaagacccagcctcaaagccccagacactgcatctctgctttcccgccttttctgtacctgtctccatgtggtgctcccttcagggcctgcacacagggaagggagggccgtcctcccgcgaggcctcaaggtgcctatcggtgcagtggctcaaacaaaacaggtgtgacaaaaggccaggaatgcctcccaggggctgaggcacctcagggagcgtgttagaagaagtggacggtaaaaagagagcgtccgggccaggagcggtggctcatgcctgtaatcccaacactttgggaggccgaggtgagtggatcacttgaggtcaggagttcgagaccagcctgaccaacatggaaaaaccctgtctctactaaaaatacaaaattagccgggcatggtggtgcatgcctgtaatcccagctactcaggaggctgaggcaggagaatcgcttgaacccgggagttgagattgcaccattgcactccagcctgggcaacaagagtgaaattccatctcaaaaaaaaaaaagagcgtccagaaccaggacgcatgcgcacattagccccgactggaagtgcatgaggacagaagggaagcagaagttggggctgaggtgttcctgctgagaagagtgatggatgtaaattttgaagctctggatcctgcccacaccatggagccaagaggaccagaggagtcagcattgaactggaaatcaagttggaactgaaaattgacttatccacaaatagtaagaactgtgaatttgggcctcaaggagaggaaattttattcctaggcagggtcttcttgggaaggcagccggacaaggcttctctgaagtccagtaaggttttgggaggtttcattgagaaactgaatactgagaatgaaatgctgagaaatgaacagatgcaacagcaaaattttttccaaaaattgtgctgtgttctaaatatttacattgaatgaatgatacaaaaatatactcaggtcaatacagttgtgcagatgatcggatttataagaaataacgaggtgacctgttaatgagagataatttttttttttttgagatggcgtcttgctctgtcgcccacactggagtgtagtggcacgatctcggctcactgcaacctccgcctcttggattcaagcgattctcctatctcagcctcctgagtagctccaggcacgtgccaccatgccgagctaatttttgtgtttttagtagagacagggtttcctcatgttggccaggctggtgtcgaactcctgacctcaggtgatccacccacctcggcctcccgaagtgctggcattacaggtgcgagccactgcacctggccaatgagacacagtttttaagttgtacagtgaatgacacttcgtggtcccaatccagttagcctacctctgtgactctgaaaaatctcatctcgagataacttaaggagtgaaaattgaaagtcttcctagtttctgcccctattggagaggggccccagatgttctgttaggaattagtaagcaggatgaccctgagaataagccacaagaggaatctgtgataactggacgtcctgagagattttctcatcagatcaccagtgctggagggacatccaggctccatccctgatgctacattgggaatgagtgatgaggggtgctctgtatggggagtgaggtttttcataatgtgcgagggtttctggctagaacaacaaataaaacaagattacgttgaataatcagactggcaaggcctcttggaggaggtgtcattgccacagagacctggatgaagtgagggagcaagggaagaagggaatgagtcatgcaggcagagggaacgtggccttttgaagagcccttgaggaggctggaatggggtgcagagggctggagcaaagtgatcaagatgggagggggaggtaggagatgaagcccatagtaaaatctatggggttttattacgaagtaatgggaaatcatgggagggtagagagtagagaatagagggagagcatgaactgatttaacataaaaagggctttcggggaggggtgatagaggctcagtaggaggctaaatacaaaagcggtcacttgctgtagggggcgctaaggagcattacctcaggtcaccagcctgggaagtagactcaggtgcaggtgagggaaatgaggcatctttccatgggagagccatggggatttttgtttgtttgggttgtcattgatttaggggaggagaacccaggaatgttgtggtcagttggtctgttgggtgtcagaaaatgtagtgggaggtcttaatgggatgatagtcatcaagggcggggtgctgtgttcatttctcaggagcatctgaggccatttcaccctgttgaagttctcgggccgcctccacagtgccgccattgttggggtttgtaatgaagtaaatcaggctctcaggagggactatgtttaggaggtaacatgaagagcaccccgtcagccaccagaattctcaaccttgtccctcacagctgaatggctttggacagattgaagttaaggtgtctttattgtggttgccttaaaatattatgttaggctgggcatggtggctcactactataatcccaacactttggaaggctgaggcaggaggatgagttgagcccaggagttcaggaccagcctggacaacatagtgagaccccatctctacaaaaaattttaaaaattagtcaggcgtgttggcatgcacttgaagtcccagctacacagaaggctgaggcaggaggattgcttgagcccaggaggtcgaagctacagtgagctatgtttgtgtcactgcactctggcctgagtgacagtgtgagattcagtgtcaaaaataaataaaataaaatgttatgctatgaagtatttcaaacacacataaagatatgagaaaccatattaacaaactcctgtgtacacattcctcaattgttttttttttttaattatttaagacggagccttgctctgttgcccagactggagtgcagtggtgtaatctcggctcactgaaacctccgcctcctgggttcacaccattctcctacattagcctcctgagtagctgagattacagacacatgccaccacgcctggctaatttttgtatttttagtagagatagggttttaccatgttggtcaggctggtcttgaactcctgacctcttggtctgcccacctcagcctcccaaagtgctgggatttcagatgtgagccaccacacccggactgcgctcttattttattgctggacagctaccattccaccatgtggtccaccctattttacacatccattgttttttttttttgagacagagtctcgctctatcgcccaggctggagttcagtagcatgatcttggctctcagctcactgcaacctccaccgggttcaagcgattctcctgcctcagcctcctgagtagctgcgattacaggtgcctgccactacacccagctaattttttgtatttttagtagacacagggtttc[131 bp omitted]ttttaagccagggtctggttcagactggagtgtagtgttgccatcatagctcactgtagccttgaactccttgggctaagtgatcctctcacctcagcctcccaagtagctggggctacaagcatgcaccaccatgcctggctaattttttcatgattttttggagaaacaggggtctcactatcttgcagaggctggtcttgaactcttggcctcaaatgatccacctgccttggcctcccaaagcactaggattatagatgtgaaccactgcacccagccaacacaagaaactaaaatagttaaaaattctagggctctgaaatctaatagaacctgagttgaaagcctggctctgctatttcttctgtgggtgctcttaggaaagtcacttcatctttatgggcctcagtttcctcatctgtcagaagagagcaagtgaatacagttgcaaatattatttctctaagtatgactctatctgagtcattatctaagtggagttttatagcataataataacagctaccttttattaacatgaaaaaatctaggctaacatttactgaggttttctaaacccttgtgaagtattgctattattcccactttacaaatgatgaaactttggccctgacagagtagccacccagaggtcacgtagctagtaaagtggtaggaacagaatttgaaatcaggtctgactgattttataactcatattctaaccgctaagttgtaccaccttaaatgcctccagcggatacttagcagtggtttccaaacattttttaaggaatggaaacattttttttttcaagcaaagtcttaaatgaaacagtaggttataaagcaagtgaaggccaaattacaccagttaaagcagggataatgcaggtacgggttcaatcctggctctgccgggtcctggctgtgtgagcttgaacagattacagtctccgtcatcacttaatggtggagatacgttttgagaaatgaagaacagcagagtgcacttacacaaacctttatcgtatcgcctactccacacctaggctgtgtggtatagcttatggctcttaggctgcaaacctgcccagcatgtcactggactgaatgctgcaggcaactgtaacacaataagcatttgtgtttctaaacatagaaaaggtacagtacaaatatgatataatcttttgggaccactgttgtttatgccgtctgttgttgaccgaaacgtcattatacagagcatgactgtacttatctctctgagattcaatttctttgtttgtaatatggggataatgatgccaacctaataggtttgttttgcggatcaactgagataatatatgcaaagcacttggcataaagcctggcgcgtgataagaaccaaattaagaatggctgctattgaattgtggctgtggctgttaccaccttcgggactgtctttactgacgatgggattgagtggaaatttttcagccccccatcatctgacccaacctgcatttccaggcctccacgcctacgggatagcccggctgaatgacagcgttcccagtccagaatcccgcactaccagttcttcgtgctctgcccactggagggccctcttcccccctccctcctctaaaagcatactctggaaattttttgaatattttaagaaactgttattgtagaatatttcaaaatttgcaaaaataaaaagctagtataatgaacctcgttttttattaggtaattaccgaccttatttcttgtgtaccccaacctgttccccccactggattattttgaagcaaatcctaaagagtttattacttcagacatagatttatcattaggtatctgcaaggtaaagactcttttttaacataactacaataatattttcacatctaaaaatataatttctttttattttttttattgtttcttttttttaattttttttttagagacggaatctcactatgttgaccaggctggtcttgaactcttggactcaagcaatccacccacctcggcctcccaaatcaaagagctgagattacaggcgtgagccgccatgcccagaccaaagatgataatgtcttattatcaatatgtccgtgttcaggtttccttcgttgtctcctaaatctttttctctcccagttggtttgttcaaattaggatatagacaagattcatatgttgcatttaagtgatgggtcccttcaatcaacttttttttgagactgagtcttattctgtcacccaggctggcatgcagtggcacaatcttggctcactgcaacctctggctcccaggttcaagacattctcctgcctcatcctcccgaatagctggaaataacaggtgtgcacccccacgcccgactaatttttgtatttttagtagagacagggcttcaccatgtaggccaagctgattttgaactcttgacctcaggtgatccacccccctcggcctcctgaagtggtgggaatacaggtgtgagccaccatgcccggcctcatcaatttttatctttttttcccctttccctttttttctacagtggctttttttttttttggatggagtttcgctcttgttgcccaggctggagtgcaatggtgcaatctcggctcactgcaacctctgcctcctcctgggttcaagcaattctcctgcctcagcctcccaagtagctggaattacaggcatgtgccaccacacctggctaattttgtatttttagtagagacagggttgctccatgtgggtcaggctggtctcgaactcctgacctcaggtgatctgcccacctcagcctcccaaagtgctgggattataggcgtgagtcaccgtgcccgactcttctacagtgtttttgttgaagaagctggattatcagttttctagaatttctcacaggaaatgccaaggttggggggagttattaacatctttcctgtagaatcctttactgtgttcctctgtgccttttcatccccctgcaaactggtagttagatctagagtctagagttttaatcaggtttggagttgatttttggcaagaatgcttcctatgtggggccctgtgctttctgttgcatcaggtctgcagaagcttgtctcttctctctctgggtgttggatagatacatgggttcactggttgtgagcctgatccaccaccataaatttccccatcagcatttcacctgccgggtttggcagtcattaatgtgaagggattagcatgtgctactccaaagtatgctgctttagcataaggattattttgagtagaaggcaattaagaagcagcagacagaagaggaactctctgtcctctccctttctgcctaaagcagggtatacatttcccatcaggtagaggagataactcaacgctggagacttgaatctgcataagcaaatcttgctaaataaccctttatcttccattaatttcccctgtatattttacttaccttcccacaatttacatcacctggatgtccaaatccctttttcaccgttttgtcacttttccacaattttttttttttttttttttagacagagtctcactctgtcgcccatgctggagtacagtggtgtgatctgggctcactgcaacctctacctcccaggttcaagggattttcatgcctcagctcctgggtagttgggattacaggtgtgcaccaccacacctggctaatgtttttgtatttttagtagagatggggtttcac[131 bp omitted]aaacggtatatgagcctcaagcctggccacttctttaggttttcacttcttttctgtgaagctcctggatgcatgcataataagccttttctcctgctaatctatcttttgttaatttttttttttaagatggagtctcactctgtcgcccaggctggagtacagttgtgtgatctcggcttactgctacctctgcctcccaggttcaagcaattctcctgtctcagcctcctgagtagctgggactacaggcatgcgccaccatgcccagctaatttttgtattttcagtagagatggcgtttcaccatattggtctggctggtctcgaactcttgacctcaggtgatccacctgcctcggcctcccaaagtgctaggattacaggcatgagccactgtgcctggcctcttttgttaatgtaattagcatgccacagccactgaacctaagacagtagaaaaaaatgtttttttccttccctacagatgctagcctacattcattattttattaaattttgaaaaacgaaaatattctattatttcttttgcatttattagtttcaaattctcgtataaagaaaaattgtgccagctgggcatggtggcgcatgcctgtaatttcaacactttgggaggccaaggccagaggatcacttgaggtcaggagttgaagaccaccctgggcaacatagcaagacacccatcctacaaaaaatttaaaaatataccaggtgtggtggcttgtgcctgtagttccaactactcaggaggctgaggcaggaggattgcttgagccagggaggtgaaggctgcctccagccaagatcatgccactgcactccagcctcggtgaaagagcaagacgctgtctcaaaaaaaaaaaaaaaaaaaaaagagagagagagagaaactgtttaccctgaagtatatagttcatagaggaaagtaaggatgaatccttgattcatttcctttatttaccagttttttaaatgagttgattcccagaagcctcccaaagtaatcacttagtttggctttggtttttagtccctttatgtcctggctgagtatgacagggactttttttttttttaagttcatttatgaatgccaaattcaaagttactttccccagttttcttaccctggtgcaaaactatctcctcccttctgtcagatttaaacatatcgttctaaggtatctagtgccttctccctggatgcttcctttatcgtaagtatcaactggatcataactccttgaaggccttctgcatagcactcaacatcatgcccaaggccgtgcttctcaaacgttattccacatgtgaatcatccaggggcaggggtcttgttaaaattctgatgcattagctctgggtgagcagagcttctgcatttctagcaagcaagcaccaagtgatgctgatgccgctggctcggggaccacactctgagtagcaaaagggtgtggtaaatgtgagaaatcagtttcattcattcagttaagaggcacctactctgggtcactgcatggactaggccctaccactttacagtgcaaagcgtttttttggtgtttgtttgctttactagaaagttttgattttaatttattcttttgaatatgtaatttgcacatggtaaaacatttttgttcataaaatccaaaagggtacacagtgaaagtatctaacttttcaaaagttatcactgttacttctcaagttttattccagataatagcagataatatgcagataatagcatatatttgtaccatatctttattttaaccacatggcagcataatgatctgccactttctttttttcattttactctatcttggagattgtttcatagctcagtgtatatctctacatcctgttgaacagatggtatagtatccacacaagattcatttgttggccaggcatggtggttcacacctgtaatccctgcactttgggagtccagtgcaggcggatcacctgaagtcaggagttcaagaccagcctggctgacgtggcaaaaccccatctctactaaaaatacaaaaattagccggacatggtggcgggcacccatgtagaagatgtaattccatcttctcaggaggctgaggcaggagaatcgtttgaacctgggaagcagaggttgtggtgagccaagattgcaccactgcactccagcctgagcaacagagtgaaactccgtctcaaaaaaaaaaaatgcatttgttattgtttttataaagtataaaatgaagagtgactacttcctgccttttattaaataaaggttatttaataagatttgcttatgcagattcaagtctccagtgttgagttatctcctctacctgatgggaaatgtacaggtcatccccagggagaacaggtgctatgtcttccattctttgaatcctctgaatggcctgacccatgtttgtgcattttgtcaatttcacatgatctagctagtatacatctgtcactcatgtgcacagcttgtctacacttcactttgtctttttctttttggttcagattgcagtctctctagactccaattgtttcttgactgtgtattctgtcagcacttgcaaattgatctggtgttctctggctttaataatatgttattgtgaaatacaacatgcataggtgtgcataaaatgtacatatttaaagaagaaatgaaacatgatatagaagtggcttctgtcacacaccgtccccccttatctcctatgtgccactctcctatcacatgggatctctccatctaaggggcaactactatcctgattctgggttaatcttaagttctctgacgttcctttttgaagtggttctcagactttagtgaatcagacttgcttagagggcttgtcaaaacacagattgctgggccccacccctggtttcgcacttagtagatctgaagtggggcccaagaatttgcatttcttttcagttcccaggggatcctggtgctgccagcgtggggaccacactttgagaactaccgccttatctcagagatactcttaacttgtgtatcgtgactcctagtcccctggggatgctttactcctcccctaaaacctagtcactcgatgggtgtcccttaagcacctcccctcttcttcctgtactccatttcctatcacctagtttgtgagtgcacaatcttcactaagtatttcaactgattgtggcatttcaccagtgtccatagttttcttctctgttggttattccatttatagctttcctctcctttgtgtgtattggaaggaagagcataagcaactttttttttttttttgacagagtcttgctctctcaccgaggctggagtgtagtggtacaattttggctcactgcaacctccgccttccggattcaagcgattctcgtgcctcagcctcctgagtagctgggattacagacatgcatcaccacacccggctcagttttgtatttttagtagagatggggtttcaccatgttggctaggctggtctcgaactcctgacctcatgtgatccgcccacctaattttgtgtttttagtagagatggggttttgccatgttacccaggctggtctcaaactcctgacctcaagggatacacccaccttggcctcccaaagtgctgggattacaggtgtgagccaccgtgcccggccaggaacatttacatgtctcattcacctggtctgtaagcgccttgaaagtaggaaccaagtttaatttcccttgtagtccacttcctcgattaaactgcagttgatggtttacaaacgcagttgcttataaaggccaaaggcaatgtaaacaagtgaagcttgccaagtagaaagttccctggaagccatgtcctgtgtaaagagggcagctgctacttggctttaagccagtcgcaggtccactgttctctaatcttcccagttttcaagagaaaccagaaacaattccaactagtttagtattttaagtacacaaattgggtcagagaaaatacatctacaggaagcaaaactaaatccatttcatgtttcaagatctttgcagtggatggatggatggatggatggatggatggatggatggatggatggatggatgggtgggtggatgggtggatgggtgggtggatggctgggtggatggatggatgcgcgagtgaatgagtgaatctggatcattgcggctgctctctggttgaaactgggggagtagagatacactatctactatatgcctggccgtgtgcaaggggctttatatacttatgtcatttgaccttcataacaacaccacagagtggttatcattcttatttatctccatactcatttcacggataaagaaacagaggcttaggaagactcaaggtcacgctgctagttttctttatttagagcccacctaattccaaaaaaaaaaaggatttcagatgggctcatgtgattgaagctgggtcctgaactttggatttcagatagctctgttacacaaaatcgccactacaaagggaatcaggttttcagaaggtaggtaagggggaatgccaacaggtcagggagtaggtttgatttgtgaaaggaaaataaaaacttgggaccccaattcactctgtcgaaaggaaaaaagataagccgaaagctgagacatgccagaagctgcctttccttttgttcctaaacagatagctacaggtaaaaggttaactatctcaacagatagctattctatgttcaccatatcttatgtaaactgctggatttactgagcatgagacaaatatataatggactattcccctacctgctccttttctcttataacatgtggattcagtgatgtgaccattccctccctctttccccgcttttcccctttaaatactgaagctctcaaaatcatctttggagaaaggcacagaccacagactgttcctctgattctgtatttttttctccccggcattgtccttaaccttggcaaaataaacttctcaattgattgagacctgtctcagatactttttgggttacaaattggcaacccgtgaatggcctctgaatggaggtggccctgacctctgacaaatctatcgttgcttggtactggtttgagctgtctttattgctcaaaccaacaggacagttttctgggtccaggagctcccccttaagagaatgagacctgtctcagataccttttggtttagagattccctgagcatcttactaagcaagtcatagcttcatgctcctcaaggatcccagccaacactaaggagctaagacacaagggggtctcttgccatcttggtgtgtcctttctatttcctcctgtctccctacttactctcctcttggaagtcaagatttctacctatcagccttggggctcattccatcttaattcctttgtaaagcccagtaggaggacagagacgcagatacaggagctgttggatggaaaatgttttattggagttcctgaggcaggaaagagttatggtaggttgagaatcagcgctcacgctagccccctcttccagtggaggtcatggtcactgggcatcaggagttgcgctcctcagtcctttcagctagagggagaggggtcagggttagatggggaacccgtgggtgcccagtataggatggcatggatggaaaggaatttctgcctcggtgtgagttcccgttctcctctatatgtagtagctaagacctcccttcagtttggtgagaaggctgatcctcctttccctgtccccactctctctcccatatcttctgcttcttcccttacccccaagctccataccctcctaatgcccacacctcttaccttaggaaaggcatcccagttgaggaaaggaagtttccttttgatagactaaaagaaagaaagagaaagagagtgatgtgttgcaggtcagccgggcatggatgggtaagcattcccttaatgaactcccacagtaaccatagtaacaataatgtcattattttgtcattactttatcaagagctaatatttcctgaggccttagtctgtgtctgccttgcacgggctgctctacaagcatgatttcagtgggtttttacagcaaccttttgtggtgggaattgtcatcatccccacatcacagaggaagcggaggccgagggagctgaaggcgttcgcatgaggccatgtgagaagtcagtgcagagtcaggagacgcgggccccagctctgtcgctgactttgccttctaagtgcgggtgggcctcagtttttccatagaggatgaggggattcaaataaaatcttgaccgattagcctcttcctcttctgcaattgtccttggggccctgctcctccaccaccatcttaggaaaacacgggtagccaggactggcgccgggggaagctttcttccgttgacagcccattgggcagcatccaggcaggacagtcactccctcccagagatcaggaaccaacccatacatttaaagccaaaatgtgtggccactaccctgggatgactgcagacaaccgaggagggcaaggggcgccggagcactcacctcaaagagggcgtgccagttcaggaactcatcagccttaaacgcctgaggaggaagagagacagcagaagcaggtcagctccaggggaggccagagcttagcccccagccctctggagaaggtgaaggaaccgtggcagctttgcaagctctctaccaaggcgtttatcccctctgtgatgagggtattcgtgggggtagcaccagagaagcgtactcacagatcgcaatttgtcgatgttcaggaacggggtgttaaaggcctaggcagaaacgcagggtgttaggaaagttgctaagaagcaaaaagagagagaggacagactcgtggctggagggccggggaaaacagacggcttacctcgggtcgtgacgcataattctcaatggtgctttcttcctggaaaaggagagggagaaaaggcggcagggggtcacgtgatgccagggcccttgcccacatccctgtctgccagctctgccttcatccacagcccagtccccgaaagaacgcaacccattccccaccatggtctccgttccagtcgcgcacatggttggcggatgtgcagggtgaggagggggaattggagaatggtacatgtaagcagtgtcaccatgggcagcaggcagaaagcctggagccgagcattcctctccggaaaagctagctagtgctgtcctgcagttgacttaagtctaagaggtggggtgttctggagacacccacgctcagtccgtatagctggatgggaaagatttgcgagcaggtgggagcccagctgctgaggtgacccgcctgcctctcactgatcgaggttgctttgctttgtggatttattgccaccactgttggaggttccataatccccctccatggggaccccaccccaggcctcagtgtgtcccatcgtgtcttccccatgacagagcccaacacggagcccgcaggctggatccagatgcttagatctcataaaaatttggtcatttgttttttggtttgaattagacattttgaattagtaagaattcataaattcatccagatttctagtttcccctgaaaaatgtaaaactctaggcacatcttcccaatccatggcgtcaggtggggtgaaagctgccctttcagactgggaaagttggccccatttcacctcaggccctgacagcccccccagctcagtgacaccactggcttggtccttagcagctgagcctgtgcccctgtcttagacttttaaatccggaataggcatcaggattcctctctggctgaggactggatggtaaagattctcactgtggcctatgctccagagacagcagggagccacccgtcacctgggcaccactcccaggggcacaaatgaagcaaagaggagctaagcaggggtgtctccagaacaccccagccccactcctctttgagttaagtcagctgcaggcagaactagctagttttttgctttgcttcaccctctccacctgctgcccatgtggatgcaggcctgggtttggagctgctctgcctcacattgccgttctccagttccccctcttcccctgcacgtccccaggcatgtgtgcagctggaacggaatgggtgaacactcttgagagcccatggtggagatagtctgaacccagaccacccactcagtcccaaggttcagtacacgagcctccccaacacacttcaccatcccttccagaaagaggagcatctctgtcccaaatgtctccccagggatgctctgttccctcctcccttcctcagagccccagtttcttcagcccccatcagaatccaaaactaagagccacttatccaggaatggacaggaggtagagagatggaggggtaggtgggtaacacgtataagaataaaaatgcaggtgacgtgctcacctcaggaccacccagggtggctccctgggcagagtggagcaccaggagggagaggagcaccacggcaggaaggaccgggatcttcatggcgtcaagtttggggtgctctgaggcggggcctcagtgcttgctctttatattgccaaggaggcagatgagcacagaaatggggtccccaccccactgactcacccccagatcttgtcgcccacccccggggctctgggagggggaggcatggactgttcctcatttgcctcggatttctcaattcgcattctgccccaggcacgtggaaggtaacactgcaatgggtctcttcatgcagatggggctgggacagagacaggttggacctgtccctccaagggattggcagtggtacccaagcaacctctccttttgtctttgtctcttttcgttatatccctcattcctctcttagaattcaggctttttcttttcttttcttttctttttttttgacaggctctcactcgttgcccagactggagtgcagtggtgtgatcacagctcactgcagccttgacctcccaggctcaagcaatcctcccacctcagtctccctagtagctgggactagaggcacgcatcacctcacctagctaacttttttattttcttgtagagatgttgcagctttttttttttttaattttctcgtagagatgaaaatgtctcgccatgttgcccaagctggcctcaaactcctggactcaaggggtccgcctgccttgacctcccaaaggactataggtgtgagcctgcgctccatgctcattcaggccttttcttccaccctaccaaaatctatgtaaactctttagcttggcattgaaggtggtccatgctctgaactcaacccacctttataacttcttcctttactagctttgtacatacctcacattctggccaaattagaccccttaccaactatatccttctttttccctcttcaaagcatccggccatgctgttccttattcctaacatggccttctctcatctccagttctcagaacccaacactcatcttggatgaagcttcccagatttttcctgcaatgcccagtccttctctccacacctttcctttcacagaattcccatattcattcgtttgtatgtctctggcattgtatctaagtaagtcatgttctcgccttgtttcccttttagagtatcaagttccttgaggtcaggagctgtatcttgatcagctttacatccccctagaaccatggctcacacagaacccaggtagagtcagcattggtcagatatgatacgttagacttagtattcaggcatccttcagccacagtgtacattttcctttcatggggctgaacctttccattttccaactgcccgtcttttactcttgggtcttcagagaaatgactgtcttgagctaagatgacaaggaacagggaacaaaaaacagctcttagggtgcccagttggagatgggatccaggtaccctgaacctggagtgcccactccatgtcattgccctaacccaccttgccccacccccagtttggaagttggatcacctcactgtgacacaatgtcctagtcaagcagccttctccacagtgaggttcaggtggccaaaccggctcctgctgtaacagggaggggctgggacatggaccggcgctgtcagggaaaagcaagaccttatcaacacaacctgatgcaatgcacggtggcggtggccctgggtgggagggctggacggcatccatgaacaacctttacgaaccccagaagctgggcacctcagctccatcctcacgctgcccccacaccccagtcccagacatcctcttcagcctcctctgattttataatggcagcttcccctttgcagagctacctgagggaacactgcttagagaacactcccttagcccagatggccacacagtagtggatgtcacagagttggtgctcctggaggggacgagttagagaatgactgaggtgggtggagcacctcccaaaaggttttctggaggacacaagttctgtgtaatgaatccttgctaattaacgaacagtgactgaaaaagctcattagccaccattccatccgcatagggtcgactccagggagtgaagaatcagacaaaagagaactgatgttgtataaccagctacgatttgacaggcgggtgaggggacccagtgccagttttggcctgggtgatctagagcatcggtcaatccaacgctgtcttctgttttgctctagagtctaatctgtgattttcctttgacaataaattgccctccctatgttttcctctccacccgatggtattgataacaatgttagctgagttactgaggcttactatatggcagaccttgtactaagtgctccaaatacgcgatctcattgaaatgtcccagtgattctgacacaggtgggtactataattattcacattctataggcgggggaaccacagcatatagaggttaaataactcaccccaggtcacacagccagaatgtgacaggaccagcattagaacgctgggcttccagagcctgaacctatattgctcctctctatgctggacaggctatgttacagcacatgtaacaccctgtgtgaattagacccatgtcctgagagtggggggcagactgcatcgaacccccacaggtcccctttacagtgtccattgtggtgcatagcctgcaccatcagaggtggcagccccaagcataggtgcattcatttaaatgaatcaaactgcacactcttgacaaaatgaaaacgaagaatgaaggttagtggcatcagcccccgaatgaacctgtgattgcctccgtttccagatgcctccagtagtataatcatcttgccacaccaagtatgtgtttacagatagggttccgtttctggatctagtgttcaacattctgctgtttaaaaataggtactttttgtatcatacctctaaacacaggccaactgctttgtgtgctcaaccaaagaaattctcttcctatgctggaaaaaaagctgtctgtgttggactcatgatttgtttccacttggcatcttcctggcaccttctgagggtagttttttggggttttgtttgtttgttgttttttgtttttgagacagagtcttgctctgttgcccaggctagagtgcagtggtatgatctcggctcactgcaacctccacctcccaggaggagtgattctcctgtctcagtctcccgagtagctgggatgacaggcgtgcgccgccacacccagctaatttttgtatttttagcagagacggggtttcaccatgttggccaggatcgtctcaaattcctgacctcaagtgatctgcctcggcctcccaaagtgctgggatcacaggagtgagccacggcgcccagctagttccatcttgacgtgatttttgctgtaagcggccaactttagaagccagtgtctctctccaaactcctccctcttcctccatctacgctgcctgagtagtttgtgttccctgagttgggttgggcagatggggaaagagaggggcagggagttctccctgggagagggtcccagcagttcaggtgatgggctgcaggaaaatctgcccgatacgcagctcagctttggatgaatcacggagggttaatggagtcaggcagccgcagagactggctctgcaacatcacatctccaggtcggcttgacttcctagctccctcactgagaataccagtaaacctctgttttcccacaggcctgcccccaccccaccccaaatctgccagaacttgagtgtgggtaggaggcgaggcccagcctggattgccccattgtgagacacacctagggcctggcagccagcctcctgggtctagggagggagtggggattccaagagagagacactaggttttcggggccttggcgaacactaggtgggaagccgggaatcctgggagagagaggggactgggatgtggagtattagggggcagaactcagggcatccctgtcccatcccttcctccctccgtcggtgttgtcacaaccaagaaagcagcctcatccaccagcaggtgtggtttcttcctttgccgcccaccctatgtgcccggtgcttaaacctctcccaggaagtcttcctggattggtcccacttaattccaatccctctctccattggctaatttgtaaatatttatttggctcttggtactgggggctgtagatggacaaaagacctgccctacagatcccatgtcctagcgaaggagacatcataatgtaaccaaaaatagatacgcaaacaagatgacttcagagaaggacaggtgctgcgaagaaaacggggccatatgatgctgacagggtttccttggtcgatggcctgagggccgagtgcggtggctcgcacctgtagtcccagcactttagggggctgaggcaggaggatcactcaagcccaggagttccagaccagcctgggcaacatggcaagaccccgtctctattaaaatacaaattttaaaaggtggcccagggagggacatttgaaattagtcctaaaagcagatgaagctctggctttctgaagaccttggtaacagccgcccatgttccctgatggcctgtgccagtaggcccagagggacgttagagagggaggccaggcccatcgcatagagccgtagtgaggaatggggattttattccagggctaatgagaagctggtggtaggttccgagcaggggctccttctagggcgttgtggaagaacgggatctaaagaataagatggaagttggggattcaggaggtcactggaggagccctgaagggagaaaggggtacccacccttcactggagggcccctcatgccaggggaccttagcctgcctcgggtgtcactctaagctttcaagagccgctttcagctctttgggccaagaacatctcacgagccaagaaccgtgttgctcacctccgcgtctcccccggtgcctcagtgactgggctgaggagacttcagctccccacgggtttccacccccacccacgctccgggaagctctctgtgcagcgaggacggagcgtcctccctgggagggccccgcgctctcccccctgtggcctctaggaggtactgcaaggccctcctatggcgttgaactccggaggacaagtgcaaaccagcatcaggatttcaggacccaggagagaagggaggccaagcagaggagcggccctcccaggcaggccgactgggtcagctcggtctcctcaagtcagttttgggccgggtttctttcacgtatacatgcactgtttgaggccctgtgcctgtcctgtgggtggagagtgacctaggcagatgggggccatgccctcagggaactcaaacctggagggagtcacttaggctggcagggcgcctcctgtccaccttttacttcctgtcccctgcagggatcccagggggacaaaggggtgggggatccttaatccgggcatgttggaccagcttggtgggacttaggggctcctactgcagacccccagcccagtcccaagggctcttcagcgtgggataagcctggctcagcctgcgccgcagcctctcctgtttcattggtacagtgatggggtggaagtgttctgcctccctccctctgcatcctggaaacacagggcagtcagtgcccgtgataaggccctgggttagatccagtgcccccaacttcctaagcgcgtctccccaaccacgcccccatccccacggcagcctgtccatgtggagaagcacagtctctatcagcacctcgctcctgtttcctgccctctccctgaccttctgggactgacctcccgttttgaacaacctctttccccctgctcctgacttgaatatttccattgtcgctttttcaggccaacaaaa[136 bp omitted]cggtgaaaccccgtctctactaaaaaatacaaaaaattagccgggcgtggtggcgggcgcctgtagtcccagctactcgggaggctgaggcaggagaatggcgtgaacctgggaggcggagcttgcagtgagcggagatcgcgccactgcgctccagcctgggtgacagagcgagactccgtctcaagaaaaaaaaaaaaagaacagtattcaagccgggcatggtggcttccgcctgtaatcccagcaactttgggaggctgaggcgggtagatcacctgaggtcaggagttcaagaacaccctggccaacatggtgaaaccccatctgtactaaagatacaaaaattagccaggtgtggtggcgcatgcgtgtaatcctagctactcaggaggctgaagcaggagaattgcatgaatccaggaggcggaggttgcagtgagccgacatcgtgccactgcactctagcctgggccacagagtgagattgagtctctaaaaaaagaatggtattcagatataggttgggcaatgatttttttttttaacagatgaggaaactgaggcacaatgcaggcttcttgtcagaaataaaacccaggtctcatctctctcagcctctgtgctttataccagtttcaggcagaaggcagattagctgcccctgaatcactcttccatcctccctgagccaggccatcaacatagcattaaagaataaaatttgagaaagtcgtagggaaacaagattcatgttttatttccacagagaaactcaaaagtaggaagctcctccttcctggagaactgtcacagtgacttcaggtcaccaaagggaggaggtacagaaagatgctggtgtatgtgacgaggctggtggccactgaagcaccacagtgcagtgggaagaaacaaggagagacaagctgggtccccagcctaggaaacagaggtgtggcagccgggccagggctggcacaggctgggggccaaggggaggagctccctgacgaccagtgcttttcggggcctcggtggtggttgcaagaaattgcctagaagaaagaaaatcaaatggtagcacgtggccactcctaagcctgcggaaacggggcatcttttcacccagcgtctgggcacccaccattcttttgctgtcctacctgttcgcctgtggtgcccctcacttttgctccgcctaaaacagagtttgtggttctgccgagccaagctatcacctctcgcccatgcagcctcgctgcgtcccacctctgaacccttccaccaggaggctcttttctccacagttcccctgtaacatctctatcccggtccctgtgctccatctagaacaccatcttctcagagctgtgcctatgtggtcccaccctaaggtgctttccgagggtcctaggtcattttctttcttctttctctcttgcttgctttctttccctctttctctctctctctctttctctctttctttccagacagggtctccctctgttgcccagacttggagtgcaatggtgtgatcatagctcactgcagttttgaactcctgggctcaagcgatcttcctgcctctgccttccaagtagctagaactacaggcatgtgtcaccatgcctggctaaggtttttcatttgtttgtttgtttgttttgagacaaggtctcactgtgattgcccaggctggagtgcagcggtgcaatcgcagttcgcagcagcctcaacctcccaagctcaggtgattctcccacctcagcctccagagtagctgggattacaatcatgcaccacctcacctggctaattttttgtatttttagtagacggggttttgccatgtttcccaggctggaatggtttgttttgttttggtttgttttgttttgttcttttagagatggggtcttgctatattgcccagtctggtctcaaactcccagactcaagtgatcctcccaccccagcctcccaaagcacagagattacaggcatgagccactgcacccagccctagatcactttattatgggtctttctccacaccccaccatgaggtcccctcttccttatcacctttagagcacgcacccagagcatacctgacttcatgtcgctgcccactgagatctgaggatataccaagatcctggccctgccccgggtgactgtgcctccactgccaggatgtggcctgggtcggctcactctgacactcacctaccaaaacttcacccactgcagcaggccaggttgcacccgggaagcctgccagaaaaagagaaagtctgagtggccaccacagggtcccttccataccctctggcctcaggccccttctctctccagccagatgaagatcaggcccccatactcaccgaggaagaaggtgagactcccccctgcaaaaagatcaaaggaaagtgatgtggggtcatggcctccctgtactctgccatggcctccacgctcatgaagggcccagcagcaagggcaggctcacaccagggctatcaccaaggttttccagtctgactgtggacattcaggctgtggagttggtttcacagcacgtttatcatcctgagtgcacttgatccaagatgatattgaacatggttcctgggcacgtactgaccaagggggtcaaaagagcataggcctcgctttggcctgccaggtagggagacactgaccacagataacccggcagagtggaagccacagataactcagcagagtggaagccacaggcagtagaagctgcatgtccctcctctcaccagcctgtagtttctcgtccctcagtggaaggtcctctccccaagggcggggactttattgtcatgagagatggaaatacacagcctgctgttgctttgtcagccaaatttgtacttagcatattcatttactgatgttatgagattgccttctttgcaacggaataaaaccaaattctcacgtattttttcttttcatttcctttgtggaataaagcattcatttcaccgccaaccaggcatccacaggccggcctcccctaagtgctagtctgctttcctcgccctccattccatcttcccccgcaaaaaaaggtccacagagagggaacctgtgaggaagagctgcttgcgtgttttgcaggtgtcatgattttttaaagcctatattcttcttggagagggtgttggttctcagttttctctgttgctgctgctgctcctttttaaccttttctgactgggtgggtgtgaggcgcattgaaccctcctgccctccacttccaaactgtctcagggaacccgagtctcccttgcaaaggggtggggaggcctggactcaaagagagcgggatccggcctccggcaaccaaccgagaggaccccggcagtgaaagcctctctccccatccctcatgcagagcccccagcgggaagacagggtggttgccggtctcacctttgcaggggtcttgactgagtacttcccaccataggcagtgggatacgcatgctggttgtaattgtagttctgtggaagaagtgggcatggcggttagaacagacggacgaaggccattttgctctggaataaacatcccaccttcctgcctggaccagacctttcctaaaacacctgcctgctcccctccttgtgtcacgtgttttcttttatacaatctcctccagccagccagggcccccaccctcacctgcctttactgtcctagcccaaatggccgccgcctcctcctcctactcctcctcctgccctcaagacctctgccaactcttcaagtgttacttgggaggtgagggtaggagaccaagaaaagaagtgccaggacgtaacccagcgggtccatggtagatgtctcaccttggaagttacagctgccacctcctgccatcctgcacccggctgagaaagccattgaatggaggagtgaaagagaatttcagattgcccagacccgggagcaaggccaagggggaccaagggccctgcagggtaacttgaggacagagactcacctgatcgtctctgcctgcacgtttctgcagtgatgacgcgtccgcaccctgaaaggaagaaggggccacagttcgtgcctccgcagtcgtgcgggcattgccgggctttcagagccccagtttctccctcaccccacccctttccacgtgctacctatagagaaggcagtgagcctggaggagctgatggcccagatagatagaagacagatatccacactcagcattgggagccagggagagaaccaggtttggcaacaccttccccacccatgccgtgggagagttggcagccccagcctaagactgagctagaacaagtgagctgcagccatgcaggctcctctggggcagacgcaggcactgcagcccagcccaccttctgcctgcaccaagtcctgctgctatgcccgtaggcccttagtccctgcacaccgacgccatgccccacagggtgcttgaaggaggggttgttatctgcagaagctgcgtgcttaggttagctctggaccacaggaagcaaaagaagagaaatacaagaaaacagataaagcaacttaagacactgcagatgcaccggacaccccccccagccccagcgcaagaggagaaactctaagcgttgaaaagaagttcagttcctgccatcacggcttctccacttggaccgtccgccctgccacacacacacacagagtgacagtgaagtcctgactccagcattaattctgccttatccatacctgaccttgaacctaaaccccactgcaagccctaaccctgaggtcacaaactggttgaccatgggcctccagatattttttgcttggtctacttaaaaattaaattagttacagttagagatcagcatcctggttcttcgtgaaacatcagacaacacgccaccctgttcacacatgcatgcatgactgcacttagctggagcgcctcgacctccccctttgcagggccccacctgtccagcctcatatacttggcacacgtagacacgggagcaggcagcctttgtctcagtgcccacgggtcctgtttctcaaaggctactggccatgcagaattggagtgtggtctttggcaccgcccagaggttctccccatcctccctgacccaggtcttcagaccctcagcagctgcctccactagacagggacctgacccctgcacaccgccctcccgttccacctcagctgtcctccccatgccgcagcctaggccccttcttcccctcaatacgatctccccgcacctgtgcaccctgcggtacccacccagccgtggctcccctgggtccaggccaggcccagcaggagcaggagcagagcagaggcagtggccggcttcatgttcatgtgcttgtggaggccccagccctcggcctcggcttttatgctagggaggtcctcccaccctgctcctcagtgactcacggcttctccctctcaccccgcccccactcgggattgcacaaagcctgggaaagtgggaagggaggggaagaaactgggacagacacctgggtcagcggctcgcccagggccccgaaccctgtgtcccagagctgagaagtcctgccccccttacctcaataattgctttccagttgaggaaaggagtgttctgtttgaaatcctgcagggagaaggagggcagagtgggccggggaggcagaacccacggggtggtctatgcagcaaattggggggattccagatctcgggtaggaaggagcttttgggtgtggcttggggttggaggaaggtaagcacgtgggagattgagggtgtcagcacttgagatggtattggtgataagatttggtgataagatttggatgagctgtctcaaaaatgaagagggggagttggctgggcgcggtggctcacgcctgtaatcccagcattttgggaggccgaggcaggtggatcacgaggtcaggagattgagactatcctggctaacatggtataaaccctgtctctactaaaaatacaaaaaaaaaattagccgggcacggtggcaggcgcctgtagtcccagctactcgggaggctgaggcaggagaatggcgtgaacccaggaggcaggagtttgcagtgagccgagatagtgccactgtacttcagcctgggtgatagagcgagactctgtctcaaaaaaaaaaagggggggagttttgaaacaggtggttggagcagagggtggctgccttgagggaggcttggggagagtcaggagggccaggcccccagttcttcaaacagcaagaattctcctacctcccagagtcggctgaagtagaggagggctcgggtgctggggggcgggacctggttctgtggatgaaaggcggggagcaggttagcagagagcctgggcccactcacccacccctcctcctgctactgccctatctcaaccttcagaatgtcattgtgactaaggttggggatgggaggagctgagagtctttagggacaccaggaaaccattttgggaaacacagggagagagagaggcactaaccaactctccctgtcccagagcatacaatgttttctatcccaagttccccagcctccagcagaacctaattctagcaaaacctcaagactaggacctgcctcagagtgtcccctttccacctgccgggcctcctccagcccgtttcccgaagctgtggggctgcagccaccccttccacaccaccctggataacagcggagacgtaagaaaggagcagaggccaggagtgtggggcagctaaggtttatttcaagggcaagggctgagattagtgatgagagggtggtgttttaaggagggagtgtgggggctcccatccaatctggtggctccttgtctggaggtcacgggatgcgagagcttctctggtcctgggcaaagaaacaggtttttttttgtttttttttttttttttttgagatggagtctcgctctgtcgcccaggctggagtgcagtggcacgatatcagctcaccgcaacctccgcttcccaggttcaagcgattctcctgcctcagcctcccaagtagctgggactacaggcgcacaccaccacgcctggctaatttttgtatttttagtagagatggggtttcaccacattggccaggctggtttcagactcctgacctcaagtgatctgccagcctcggcctcccaaagtgctaggattacaggcatgagccaccgcgcctggccagaaataggttctaagagagagcttgagaaataggaattccagggcattgtgagccagcacaagggtataagagacccctgctccagaaacctacagggacctttttgcccaccactgctatccaaacaaacccagatatcctggcttgggcttaagaaccccctgcatcgtcaggaacattacactgcgttcccctctgctccctcctcactctggctgaagtcctcagctccctcaccccactgtgaagaatggggctccattctctcccctgcccacctctgccctgccctgctttctaggagatctgccccttgaggagctggcccagatggatcctgcctcactgcgatcactccctcgactgccgccctagatgggcaaaactggcagggtgtctatcctggctctctgggaagtgtctgtatgtgccccggctctcccatcagaccctaagttccctgtgacccaggaaagagtcttgctcctaccagaaaccgttctctgtgaaacagagaggccagatgcagtgactcatgcctgtaatcccaacattttgggaagccaaggtgggcagatcactggaggtcaggagttcgagaccagcctggccaacatagtgaaagcccatctctactaaaaatacaaacattacccgggtgtggtggcgggcacctgtaaactcagctactggagcggctgaggcaggagaatcattttgaacccaggaggcagaggctgcattgagctgagatcgaaccactacactccaacctgggtgacagagcgagactccgtctcaccaaaaaaaaaaaaaacaaaagaaagaaagaaagaaaaagaaaaaagaaaagaaacagagaacatgaatccactgtagctgggtgggaacatctgtactctcctgtctcctcaatctccttcctaaaaggtcagacttagattttcctgagcccagtcttctctcttttacattaaaggccagaaactccactgctcacaggggccagtcaggtggctaaaatgactgtgacaggtagggacagtctggccactagggagtgacccccccacccattcccaacaccccccacctgggccaagcagcagctgtttctcagctctagcctaaccccaccccatggaaatggaacccagtgttaccaaagtttttgaaagaaaccagaaatccaaatcattatgtgaagtctctccatgtttaaactttgacaattaattcatattcttaaaaaaaaaaaaaaatagagtgtctcaaaaacccatcctccaatcacgaatcgcagcttctgccgggggtgtgtctgcatgggttgtccacctgtccttcctcccctcccttccactccagccccctctactctagaggtgcctgtgctactcaggtatcaaagcagcctggccaggggttcccctgcaagacggaagggtaggcagggaggaaggagggaggggttctgcgccccagctgtgtttttgtttgtgcgggagagactaatgcctgtcacccctgaggctctcggccagtgctggttcctttctctgggtgcccttcctcttggggcctcttagctccacctcactcctcattccatgtgccctctaggagtcaatctactctccccttaaccttccccatctcaaaggggaaagtgaggttcaggacctgctcgggtctatatgctgaaacagcaaagaagcccgtcccctctgctcaacctcaatctcagctgctccagattctccccctcttttcaggtctcctctgtcctccctcctccacccccagtgtgtttagtttttgtttttagcactggcctaaatgcttcctcagtggccagcatcactgtttccccagctcacagagcggaggtttagctttcttccctatagccctctccgacgaagatgtccagcccttaccttgtttatggcatcccagttgatgaaacccagcttggatttaaaattctatggaggaaacaaaaagaagaatggccaaattgagtcataaggtaattggccgagagaggtcaagggccactgctgactgttggtttagaaagaggaccccagactgtggggccaagggcaggggttggttttccaaatgcgagtgaacagagccatctcgcagaactcaccttccagaaagtgtcaaagttaaacatcccaggagacgtctcagagttctatggaaccaaggagatatgggatgagagaagaacccactttgtgagccagagtcgggagatctgagtggcaggaggggaggcgaggattgtgtgacaccatggtcccagcccaaggtggagtgttgcctccactcaccacagtattgactccaccaacagcgtcacctcctccactgccccagctcgacccttgcccctgggtggggaaaagggggaccgatgtccaaggcttatgcttcctatcatgcctgccacctgtcaacctgccccggattgcttcatccccacctcggtccaggcttcctgtcctcctctctataaagctgccttctcttccttacacagcaccaaaaagttcacttgggaaagctttcttagaatggattgctcccatggaaccccacccagtcccctgaatctcaatattcagactcttgcctccatcctggtctgtccccaaaacacctcaagcaaatgagattagctaacgtgtagtcccacggcacgccaagcaccatgccttatgcagcatctgtctccagagtctggactccacaacaccttggtctggtggtgacatggaaagctgtacagtaactgaaggctgcgtgagtcaggtttcactgtcctcattttactggaggaagctcaggctcggagaggttagctgacttgcctgaagatatacagatgacatgatagagctggtggtgattttaatatatatcttaaatttttttgaggctgggcatcgtgggtcacgcctgtaatcccagcactttgagaggccgaggtgggtggatcacctgaggtcaggagtttgaaaacagcctggccaacatagtgaaaccccatctctactaaaaatacaaaattagtcaggcatggtggcacatgcctgtaatcccagctacttgggaggctgaggcatgtaatcctagctacctgggattacaggtgtgagccactgcacatggcctattattttctttttaaaaagtagagacagggtcttcctacgttgctcaggctggtctcaaacttctgggctcaaatgatccccacacctcagcctcccaaagtgctgggattacagttatgctggtgcctggccagagctggctttcgaaacctcatcttctacctcaaagctcagtgactttctccttctcaacactgcctccctaagtatggaaatccccttgaccattcttctgttacttttatctgttttctccccttacaaaagtaacatggctccgatccaaatcaaaaggaaggaaggaatgaatgaaccaaagatggagatggggatcccagaaccctgttttggtctcttgatggtcactggacgcagattcagagcagcttgcaagaagaaactgatatttttgtttcttttcccaggatcttagcatgcttcaccatcccttctcctaaagccaaccctgcctgcccctaggctcaccctataattgtctccagagcctccaaggaggcgattgccctctttgcttatttcctagggagacagaaaacggagaggagttgatggggaggcaggcgggcagggggacgagagggcaaggaagcagggtgtcggcgagggattcctgaatcgggggactgagacatgagcatgacagaggacttcccagaggcctgagaaagaggtccttctctcggggaagttccatctgccctgagatctcgtttcaagctcctgtgggtcgggtggctgctcacttacgatgtccatagataacatcgccatctctgtttatgttcatttctgcaagccgcccaaaatccatcagggagggctttgccagcaaagcatccgaattctcccctggctttggagctggagtgggccaggctgttacactaaattgattcaaactgaaggaccctgtctgggctgattggcattagtaaaaaaaggagatgctagctggagagccagtgggggctgaggcggcatagagtagactggctggtcccctcttaagggagaggtgggctcctctggagtcctgctttatctgctgtgaaacatggccagacccatcagtacttcctcgttcccagagctctcaggtagacctggcagggatgtgggaccacctgtctgccagtattgctcctggagaacagacctctaccccacttactaccggcacagtctctgaccccacatctaccatcctcttaccctcatgttgctggaaactccctgtcctctgaagccctgcagggtgagacaaagaaacacagacccctgctgaagatcctgaggccacccccgaaaattaatgtattgatttaatatgattcctctaagaatcctaatggcactctcttttggaactggtccaaacactgacatttttttaggagaatgaaagtttaagaataggtaagaaaacactggaaaagataaatggtaagtgaagataagaggtagatagtaacatactctaaagctaccataaataaagcagtcctgtccgacagaattcccagaaactccccaaaatactaaggtatttacaagaggcattttaaatcagtggttgaagtgattgaatacatgggaatgggaatatcagtgaagtattttgggggaaaattttagttctagctcatcaatttcctcctctctgtttttaaccagttttcccctcataaaggaggacacagctcggatacaaagcgtagggtaagtctggttagatggaggggtgggactagacagcatataggaaaacaaagtccagatgcatcccagttaaactgaaaaagtgaaattgcaggagtatgcatagtgctagaagaaaattaccttaaagcggtacaccaagagcaaaaaccatagaggaaaagatggctgctttttgactacttatatacttaaaactgaggtatattaaaaaactagaaaagtccgagtgcagtagctcatgcctgtaatcccagcactttgagaggcagaggcggacagatcacctgagatcaggagtttgagaccagcctggccaacatggtgaaaccccatctctactaaaaatacaaaaaaaaattagccagaggtggtggctggcgtctgtaatcccagctactcgggaggctgaggtaagagaatcgcttgaacccaggaggtggagtttccagtgagctcagatcgcaccactgccctccagcctgggtaacagagcgggactccatctcaaaaaggaaaaaaacacaaactagaaagagggttacaaatgggaagaaatttttttttaaaaaaaccagtttgttcccataaaaggttagtatccctcatagattatctaaaaagagatgtctctactcagccccagcacctccggtctggccttgcccctggccacgtgggtcctttcccaccaacgcctcacccaggagcttgttagcaacgcggctaacaggctcagccccacccagccctgttagagcaacctgcactttcacaagatctccgtgacactaactctcagcaccacaggtgctgacataaagcccacatttccagcataactggggggaatgtttttccaaagcactctgaatcccccagagttcaccacagtctgttccccggctggatagaggacatttaagacaattgtgcttctaaaaggaccggtttacatggaatttctcccagccccatctgtggtataaggtgaggtatatcacagcaagatttgcaattaattagtactttggaaatcgttagcatttttaggagtgcatttggtttcttctgccgaaatagtcagttccctgcagacaaggcaggagggggttgagcagagttgagttaggaggagtgggcacagtcctgggcaggaactgcagtccccaggagacttaagagactttggctctcacctgaatcccagattccccgctcccgcgggcttcattccctggcttttcacactgccggggagagaaaggggagactttccctcagtcccctcccagaccagtcccagccccaaaatggcagcattttaaccctggggcgagccgcttccgctccacctccgcggccatccagccccatctccgcggagccttggctccccgatcctgcgagtgaaaccagctgctctccttttccttcccgcggttggtgggagattcacgccagccactcaccccgggtttatgtccatttcctccgccgctcccaccgtggttgccggaggaggagccggtgctggatccctgcaggggaaagcaagatttcaaacgctgtcctaaaggacctaaaggggacccagtcgttcccagcggtgttacagatttgttggaaccccaatcagattccagtcctctttccaacctccagaccttccccctctttagcctgttggtcgctgcaggaagttattccgagcatggagaaggccaggtgtggccgagggtattcggaactacgcaatgatttggagaacctgagctgctgcccaccgcaggccgggggtgggaacccctggagcccggccgcgcagtagccgcgatcctgccaccagggggcagcaagtggaagggaccctagagccctcacctgggagcggccgtagctgccttggtcaccattcccagaactgccctagatgggggagaggaggatcatacggggagcggcgcatgagagcagctcaggttattcggcttattgtgtccacgcacctcctcctgtctgacacttttcccgacccccgaggaagccagatgtggctccctctccagctcgactccaagacacgggatgggagaggccgtcagccaaggggttggacaggccattgaccaggaggctggagagactgccggctctggagtcagtgaggcccggggccctggggtggcagctgcggggtcacagcgccccttcctgccctcacacccatcgtgcaggggccccatgtgtgaatgtcgtctgcaccgtcgctctgtcagcgtccgtaggtctcccggatcacagtcctgcccccattctcctgggagcttcccagacaagtgtcatattctcccatgtccccctctttctccgccaccccacggtctcctgagacttgccaagtggacttgactgcaagagcttagacaggcgggataacgtccccaccatcacagagtggaaaatagggatacagagtcagaagcagtggggtggctctggcagaaacgatagtgcgcgcatcaggggcacagcatgggtggggaacaggaggctgagggagcctcagggtgacgactatcagcgaggccgcccatcctcgggcagcggcagctttcagagaaacttggagccctctcccggcagggaccactagggcctcaccccatctcagccttccacagaggtgccaaactcacccaggaggactcactgccgctgtcacctctgctgccaccactgttgccactgctgccaccactgctgccgccactgctgccgccactgctgctgccactgctgctgccaccactgctgctgccattgttgttgtcaccattgctgccactgccactgctgcccgactgtgagccgctgcctccctgaggggcaggaagggagcagggctgggattaaagacagagcaccaagacgggcccctcctccctccctctccacccaggccatattccatgatgcccagtctaaggggagcagaacttctccatttcctcctggtgcacaactcctgggttgcccctctccactcaccccagagttgctggagcctccacctgagccagatggtgggggattcgtgcactgtcgagggaaagggatggtgagtttggggacggtgagtttggagacgttggcctcggccatggacacaggccaggcctctcccattctttggggcttggcttcctttctcctaatgtgtttctcccacctccccttcccatctgcctcctccccaggcccaggcccgtctcttcctccttttttttttttttttttttttgagacagggtctcactctgttgctcaggctggagtgcagtgatgcgatctcggctcactgcaacctccatctcccaggttcaagtgattctcctgcctccgcctcccaagtggctgcaattacaggcgcatgccactatgaccggctgatttttgtatttttagtgaagacagggtttcaccatgttgaccaggctggtcttgaactcctgacctcaggtgatccacgtgccttggcctcccaaagtgctgggattacaggtgtgagccacctcgcccagccccatctcttcctctcaccccaatccctccactcccccatcttgctttcctctttgtctttccccagctctctgtagcctgcacccagtggcttcttcatttgttcccagccccttcctcttaccccttcattctggttgctggctctcactgaaccatagccaggctgggccacagctccctgcagagagggtgagactgagagtaggatccagagggaccagggaggcacgcggagcatgtgggcttggagggagggaggtggcaggtagcaggtctgggggtgactttacctgagtgttggtcccaaagtttggtggccctccattgcctccttgaccccagggagctccctgaggattcattccaaagctgcctgctgagtttccggggtatccgtggacccacggagtccccagacctccaggattgccctggccctggcctccaaggccaccttgagagccaaagatgccatggcctccagaagtttcctgcaagaacaacatacctgcacttagtgggaccatctctgaccctggtagagaagagccagggcaaatcataaagagaccaggagagagacaggcagagggactccagggtggcataggaggggggcagaacatagaaggaagctgccccagaagcctgcaagtaagagatccatccatcctttcaaccgtttcccaagaatctcagcccagcagcccacagcctcccatttccacatgcagccccacagccactcacccaagcaccattgtggccaggcaccccctgccaggagccgcggacagcatctgctccgtgtcgaatgacatcttctgcctgtctgccaatctcgtgcccagtgtttcccagagcatgggctgcttccccgaccctgttgcccaaagcatctgctacgccaaagcctggaacctgcctgactccagtgccaactgcttctctggtcccttggccaagggcctcactgactttagagccagctgcccctccggcctctttgccaatggcctttcccaccccttcgctcagggcgtctcccaggccatgtccaagggcctccccaatatttgtcccagtgctttcctctccgctctgcagggggccagcctccccactgcccaggcagagggccagcaggaggcaggccaggggcccctggaacttcatctctgcccagccccctctctctccagagtgtcttcctcccaccagggtctcctccttgccgcccttgctctgcgtctctgtgccctcctctgtcctcctccttccgactccctgtcctccctccctctgggtctgcagccttctctctcctgtcctcaactgcctgggcttctcagagtccacctccctgtcactactccttatactctaggttgggagaaggtgacagggctgggcaacctgaggtccctccccgcagtgactcagggcccagccaccaatagggtaatcagctgttattgtgagtctgagagtctctgtcgaaacagagagtgagccgcatcagggagggagggagaaatggatgaggtgatgcaaaagtgctcccatttcccaaccccaggcattcggggagctgggtgggggcaggggcatctaaggagacaggttgtcgttggctcctggaggcggtggggtgggggcagacttagaagagaggagttactggcaggaccccaccaaaggagtaaggacagggaagccccaggggacaggacccacccaggctcagccagcctggctcaggggctccagagtgacaggcattgcccgtcctcggcctggcctttctcggtttcagcacctcagcctctcctctccctctcccctcccgcattgccacctacaggtgactgccttcttgttcctccacaccttccagcccacagagagagactggcaaacacggggctgcgtgtcagtttctgagattctggggagagcccccggggggaccctcggtgtcggggaaggaggtggccatagccctttgagtggtcagcagggtgtctcagcgttcaggctgctcccggctgagaaagctgggcgcggagcagggcagccaggcgcgccagccacccccagggaacgagtgggagggaaggccaagggagggagccgctgacccaggcacccatcctgtttacgcagccctagaggggcacgtgtgagtataagcgcctatgaggggcgggactgggccagctcaccccacccatcccccaggccaggggccagggcagcaatggcaagcgagaagagggtagcgcaaggtcaggagccatccgtgagagccacggccctctccccagtcccagctcgggatacagaacctgggagcctccccccgcctcacccctgcccagcaagtgtggctgcttctctattcccaggggccacagggcctcccactgtttcgtatcactggggttcatcgcccagttaggaggggccagtttccatcagcctttctcaatgtctctcagtcagtctctctcttctctccaccccaatatccgcaccccagcttataacatccaacacttcttaccttgtaaacactatccccatctgtcctcctcagctcctacttccctgttattccatctctgactcgttaatgatgataatagcgatggtggtaataataataataataataataataattacagctccagcttatcagcggttctgtatgtacccagcattggactaagcacaagcagtttaagaattatacaactctgggagatggttctttttttctagagacagggtcttgcccaggctggagtacactggcacaattgtagctcactgcagcatcgacctcctgggctcaagcgatcctcctgtctcagtctcccaagtagctgggactatagatgcacaccagcacacccagctaattttttttttctttttgagacagagtcttactctgttgcccaggctgaagtgcaatggcacgatcttggctcactgcaacctccgcctcccaggttcaagtgattatcctgcctcagcctcccaagtagctgggattacaggcgcatgctgggcctgtaatcccacgctgggctaatttttgtgtttttagtagagacagggtttcacca[139 bp omitted]ttgttgtgttgcccaggctgatctcaaacccctgggctcatacgatcctcctgccttagcctcccaaagtgctgggatgacaggcatgagcaaacagtggtattacattatgcttgctgcagctcctgcactctctttgttttttgtttgtttgtttgttttgtttcgagatggagtctccctctgttgcccaggctggagtgcaatggcgcaatctcggctcactgcaacctccacctccagagttcaagcaattctccttcctcagcctcccaaatagctgggattgcagatgcacaccaccatgcccagttaatttttgtatttttagtagagacggagtttgaccatgttggacaagctggtctcgaactcctgacctcaagtgatctgcctgccttggcctcccaaagcgctgggattacaggcatgagccaccacgcccggccatgtgccctttttgttaagaaggaagattagcaagtatgaaagaggtgttctgactcaccagcacagctggacatggggtctttctcaaaggtaggtccaggcctcaagaaaataacactaataataaattttttcaaaaactaaaatgaagtctttctctttaacatagtcagagagcttaaaagaaaattgagaagaaagtaagtttctccctgtgtgattcagttattcaaagccgtgtccatggatcacctcaattctcccatgccaccaacaggcctgtgttctacctgctaggaaaaaattgcccctcagacatcgctgggcctgaggagccacctcagatcagccctagggcatccttattaaataactagtgtgaaccaaataaaatattaggtgctttcacatacatgatctcattgaatcctcaatatgaccacaagaggttaatattattcccattatacagatgaggtaactgaggcccaagtggctcagcatcacacacaaaatcatatgtgaaaagactgtggtaaaatagagttgtcaaaacttgagccaggcactttgggaggctaaggcaggtggatcatctgaggtcaggagttcaagaccagtctggccaacatggtgaaaaccccctctctactaaaaatacaaaaattagccgaacgtggtgacaggcacctataatcccagctactcaggaggctgaagcaggaaaattgtttgaacctggaaagtggaggttgcagtgagccgagattgcaccattgcactccagcctggacaacagagcgaaactccgtctcaaaacaacaacaacaacaaaaaaaaacttgagccaggtcagtctgactccaaacagctttctctcctccatcaccatgccacccatgttcttatgcgtgatggcacccacaaatctgatatgcctatgtcatgtccaaggccctctggtctcagctcttctctctaattcacatcattcattcagcaaatatttatgactacctgctccgtgacacgcctattccagacactggggatacagcctagaaaccattctccagctgagtgacacctcataatcccagctcatgcctgcaagcccagcactttgggaggccgaggcaagtggatcacttgaggtcaaaagttcgagaccagcctgggcaacacagagagaccccaactataaaaaatgtttttgaaaaagtagttggatgtggtggtgcacacctgtagttctagctactccagaggctgaggtgagaggatcgcttgagctctggaggttgaggctgctatgaccacaccactgcactccagtctgggtgacagagtgagaccttgtctcaaaaaaagcattctccttgcagaacttacattcatggtgggggaagttaggcaataggtgacagagaggtgttttaaatagggtactcgggaaaggctctttgagatgtggcctgtgagctgacccctgcagggagtggaagagtgagccatggggattagctggggctagtggattccaagcagggggaacagccatgcaaaggcctggaggcaggagcctgcctactgtatttgagaaccattgtggctggagcagtgttgggatgggagaagctaaagtcaaagagggaaagatcctggggtcttgcggactattatgaagactggcttttttttttttttttttttttgagactgggtcttgctctgtcgctcaggctgaaggtcaatggcgcaatctcggctcaccacaacctccgcctccagcgtacaagtgattctcctgccttagcctcccgagtagctgggattataggcgcctgccaccacgcctggctaatttttgtatttttagtagaaacggggtttcaccatgttgtctaggctggtctggaactcctgacctcaagtgatccacccgcctaggcctcccaaagtgctgggattacaggcgtcagccaccacacctggccaactttgacttttatttttactctgaatgaggtagaaccagccaagggttctgggctgccacgggtgctaacagagttcccctagggaactgattgttgggggttgtggagtagagagaccagggaggagggagattggaggctggactcagtctagtgggaagatgaggctttgggggtgggtgatgtctctgctcccttctggggggtcccagatctcaaactggcacctacagtcttacctcttccacggtgcctatcccagagcctacattcaaaccctagctccaccgcttactaaccatgatcttaacccatctgtgcaacagttttctcatctgtaaagaggggtgaatgtgaggattaagtgaagtaatacatgtaaattgcttagagaagtgtctgccactcagaagcactcaatatatgttctcggcagtgctggtcacattgctgtggctggaatgctttcttggcagttgtttaatcttgtgacacacacatgcacacatcctgaaaatgccagatgcatggctcatgcctgtaatcccaaaaccgtgggaggccaaggagggaagattgcttgagcccaagagttcccgaccaagctgggcaacatcgtgagaccctgtctctacaaaaaatacaaaaattgccagggtgtagtgacgtgtgcccatagtcccagccacttgggaagctgaggcacacggatcacttgaatccaggaggctgaggttgcagtgagccatgattacgccactgcactccagcctggacaacagggtgagaccctgcctcaattaaaaaaaaaatgccagatgcagaaacttacttttaaagaacactcatttggagccaggagagggtagctctcacctgtaatcccagcactttgggaggccaaggcaggcagatcacctaaagtcaggagttcgagaccagcctggccaacatggtgaaacctcatggctactaaaaatacaaaaattagccaggcgtggtgtgcgcctgtaatcccagctacttaggaggctgaggcaggagaatctcctgaacccggggttcggaggttgcagtgagccaagatcgcaccactgcactccagcctgggcaacagaacaagactctgtcaaaaaaaaaaaaaaaaaaacccactcatttggatgtagccccctcccgcttcctgggggtcgcaagggcagcatgccacctcactgctagagatgttcagcagggaagtgcccttgaactggagcctggccatcaccactgactagcagggtggcctcaggcaacacgctccgttccgtgcacctcttcttcaacatctgtgagggcaatgatcatggtacttgcctcccggatggttgtggggatgaaatgaatcatgcctgtaagtgcttagcacagaccctgtaaaagatgcccggtgagagccacacccaaactcctctccctgttcttcaacatcctcagaaaccggcccttcctctctgtgtttctccctagcctggctccacccatctcaggcaaagcagcctgtgtcttgctcacactcgttccatggcccttcccaacctgctcaagtcagtggcttcccttctgctccttgccagacattcatgcctggccttgacatcactgcttgaacctctttgtctggggggaaatggatacgatatttgtaatatgattacagattgtcataaccaacaagaaaaacaagatcagcgctatgagagagagtgacagggtggccgtagctcaggttgagcggtcaaggtagctgagatgcaaagggtagggaagagccagtatgaggggccgaggggcatggagagtgttcctagtagagggaacagcacagaagacctccaggcaggagagagccaggcgtcttttaccctcaaaaccgactcaaagctctcctttttcagaagcttcccaggactgactcagtgcctatcaattatcttgtatctctttggtattttcaggacccccatccaagcaaacccagcaagaaaatgtgcctaaaaaatagtcagtcagccgggtgatggccaggcgcggtggctcacgcctgtaatcccaatactttgggaggccaaggcgggcgaatcaactgaagtcaggagttcaagaccagcctgaccaacatggtgaaaccccgtctctactgaaaatacaaaaattagctgggtgtggtggcgcgcacctgtaagggaggctgaggcaggagaattgcttgagcctgggaagcagaggttgcagtgagccgatatcaccccactgcaatccagcctggatgaaaaagcaagactctgtctcaatatatatatatacatacacatatatacatatatatacacgtatatatatacacacacatatatgtatatttttttaaataaaaataaagtcaatgaaagcttttacttcaagaaagaaagagtcccttgaatgttgccttttcgaaagccgccactataggattcttttaagtagggcctcccccaatacctgtgagatgatgtccagcacggagcagaccctcaatcagtatctgacatgaatggaaggttctatttatatcagtgcagcaagcagctgggtgctgtggctcacacctgtattcctagcactttgggagcctgaggcaggaggattgcttgagctcaggatttcaagaccagcctgggcaacattatgagaccctcgtctctacaaaaaaaaattacaaaattagccaggcatggtggtgtgtgcttgtagtcccagctacttgggaggctgaggtgggaggattgcttgagcccaggagattgaggctgcagttagccatgactgtgccactgcactccagcctgaacgatagaccaagactctgtctcaaaaaataaataagacaaaatgcagcaaatataatgtttacagtttactttgaaatacatcaaaaatgtttgatatggggctaaatggacagatgtgtgaccaagcaagtatggtaaaatctaagtggtgagaattctggtgttcactataaaattctttcatcttttcatgatgcttgaaatgttttcaaaataaaatatcgcagggggagggaaggagcatatgtaatgaaatgatggtattccacaaaataagggaaaatgcagtgactataaagtgaggaacgtcccattttttgcacaaatgcaggcccctccccttgccggtcattgagctcttattgatgcgtggctttgtgtgtttgcattcacattctgtttataggccttgcctcccaggaaggctgtgaattccccaagggcaagaacactgtctattattttcagtcccccattgatggaattttgtagctggaagcaacagttgtcgaatccctgcctccctttatacaggaggaaatcgtggcccctagaggggaagtaggcggccttcaggcatcttgctcccgattggaacgcaagtctcccagcacccaggctagtgcctgggagtgttacagagacttcaccgggaaccacgagaagtcaggtgctggcgacagacggagccagacccaggcctgctgctttctctgtgggcgcccttgtcccactgagccgcagcatcctcatccatacaacggtgacgataacagggcttctgcctttgggttgtgggagacttaaagagttaaagaacatgaacaggccagatgaagtggctcatgcctgtaatcccaccactttgggaggccgaggcaggagaatcccttgagcccaggagtttgagaacagcgtgggcaatatagtgaggccctgtctctaccaaaaaaagaaaaaaaaaatttttttttgagacagggtctcaccctgtcacccaggctggagtgcagaggtgcaatctcggctcactgtaacctccacttcccaggttcaagtgattctcctgcctcaacctcctgagcagctgggattacaggcacgcgccaccacacccagctaatttcttttttggtatttttagtagagacagggtttcaccatgttggtcaggctagtctcgaactcctgacctcatgatctgccagcctcggcctcccaaagtactgggattacaggcatgagccactgtgcccggccaaaaaaataatttttaattagccaagtgtggtggtgtgtgcctgtagttccagctactcaagaggctgaggtgggagaatcccttgagcccaggagtttgagaacagcctgggcaatatagtgagaccccatctcttaaaaaaaaaaaagaaagaaaaagaaaatttgatgagccaagtgtggtggcgcgtacctgtagtaattccagctactcaagaggctgaggtgggaggatttcttgagcccaggaggtcgaggcagcagtgagccatgatcgcatctctgcactctggcctgggcgaaagagcaagattctgtctcaaaaaaaaaaaaaaaaaaaaaaaaaaaaagaatatgaacaactctggacacggtaccttgagtctagcaagtgctctatgctcagtaattgtaatcattgttcctctgggctttgaatggtccacagatctgaaaatggggccttctgtgcccctactcaggtggctcctgtcaccagcatgtcttccacctgagccttccatccttctccctctttcccctgagaggatccccagccccatcccgtgtctcacttttcttattcaccaattctccttctctgctgacgccaaagggcaaagacctctgtttttccagaatatcctttgtagctcttcactgtttctctccttccacttactgactgtgtaaacttggtcatgtttcttaatgtgtgcaagcgcccacgtgcttctctataaaatggggcaataacagtccctttcacctaactggggggttgggaggagtcaatgatgtcatgcaggtaacgcacctggcaggcagcctggcaggtcttaactgcacaataaatacaagttattgttgttattattttggcgccccccacccccttgactgaggatgctacctcctgggcccagaccattctctcccggtgtgtctgtccccacgagtggcctgcagtggttttccctgcacgagtcctcctgccagtagccagcacgaactttgcaccccagcaaagcgtggtttgtccccattacccgccctcttacagctaatcagcctgaaatctccagctcaacccaccctatgcctcagacactccgactccttcagcaaagtaacaagaaaagacaaggccctcctgcctccctgtccatccctccttagggagcccaggggaccacaatgagacagcatagtgtatcaagtttattcacaaatcccagtacaacccccttcagggatttcagaaacctgtcccccacccccaacccctccaggtcatgtcagctgatgtgacaacggcgacattattctcccagcaaggccggatgccagtttagggcatgatgttggcgacgctctggaagagagaaggagagcaggggtgaatgtagggtccacagtcatgacgggacccgagacctcagccccgcccctcgggagaagcacaaggggactggctgctctggccccggagttatgttctggggaagtttcaggaaggtagcatctaaacttaagaacacaaggaagccagtccccacaggcagaggggctggggcctctgcaggaaccaacaagcctcgtgtgtttagcctgagaggatgctctgccgcccccatagcctgggatacacaagggtgggccttcctcctccgtgatacaccctcaccctggcctgcaccaggt[133 bp omitted]tggtgaaacccctgtctctactaaaaatacaaaaattagctgggcatgttggcgcacacctgtaatcccagccactcaggagactgagataggagaatcacttgaacccagaagacggaggttgcagcgagctgagattgcaccactgcactccagcctgggagatagagtgagactccgtctcaataaattaaaataaagaaagagagtcaggagtttactttgagccccaactgggaaccaggattccataggagcctctgcactggggtgaccttgcaccagggagaggacaaagacacaggctccccctcccagcatgaagcaaaggcatttgcaggagggttgggacaggagggaagccagtcagcaaatgggaatcgaggaatgacaaggagagagagggaatgagaacagtcagcagcccctcctccctccctggctcccaggggcaccagggcctgggaggtcttttctgccagcttgtgtttgccttggtggaaatgaaaggcacccaaaagatgagggcagggtgcaaaggggagggagcaggtggagagagggaagcccaggactgggtatcaggttggagggtctttgcagaggctgcaggtctgcccgcccggggagctgtccaaacagacaccgggaaggggtcggggtgagcgtatctatcaggacgcagagcagaaaagagacaccatggggcactcaccctccacagggcgggaaggttgatgaaaggcgtgttgaccgaggcctgcaattcaaggacaagaaggtcagtctccagcgtctgacccacagccatgctagggaactcccaggggcctcctctcccctaccccagagtccgcgcttaccccagaggctaacggcgtggttgtggcccctccttgatggctggaagatccgctttgatggttgccctgtggacaaagcccagactcttgttacaaccccacaaacgcggagggtctcccagttccttttccccagggacctggtcccctccagggtgactggggctgcggtgggaggcacagcttaacccactgcctcctcactgtccagaagaaaacccaaagcccgtgctcgcgtgggcattctgcctcctgctgccttttcctccccaaagccccttttaatttccttaatgaagtgctctcagtcatggaggaggggctggtggaaagggaaggtagaggacccgtgacaaacaatatcaggacctagtttaacctcagccctgacctcaaatctacccttctatgccctgtctagctgcatccctaactccactgatccttgtccttaacccagccccagacactcagccatgcaccccagcagtgcccccaaccccggctgctgttgccagccccaaatcctacagtgcaccgtcctctgctcgcggcaccctgcagcctgccgtgcccgctcctctgctgcgccgttcctccccacccacccatccctggctctgtctggcggcagatgtggctctggacttcgacgtctgagccagtcacatcttgcagatccaggacccctcatggagcctggagagtgagggcgcacaggagtccaccctctcctgctccccacgctcccttcttggtgcctgttctgttgtgagtggtgctatttgcctgcctccagtctctgttccctctacatattttattttattattattttttttgagacagagtctcactctgttgcccaggctggagtgcaatggtgcaatctcagctcactgcaaactccgcttctcgggttcaagggattctcctgcctcagccttctgagtagttgggattagaggcgccagccaccacacctggctaatttttgtatttttagtagagatagggtttcaccatgttggccaggctgctcttgaactcctgagctcaagtgatccacctgcctcggcctcccaaagtgctggggttaacaggcatgagccactgaacctggcctctgttccccctacataaatgggtaagagaaaccttccagaaaacctctcctggctgggcagtgcaggggaagagaaccctggcctgccctctgccaaagctgggcactagccacaggactttggcacgtcccctaacctctctgagcctttgtttccttatctgagaatcagggcgtcagcagcctcatcttgaccacatcagagggtagttacaaagattacacaggccaaggctcatctccgaaagctattcctcatgctcactctcctaaccaggttttgtcaacactcagtccctttgcactatactagatcttgatctcaggaactgtttcccattccccaggaagggcttcatgggccccacttgaggcccccttaaccaggagggcagctccctgaaggtgggacagggtgcccgccaccctgtctgatacgtgctttgcagataaggtggctcaccccatctgaccagctgccaccagctcctttgtaagggagatggggaagggggaggaacccagtgatatagctgcccaagcttctttcaccaaacaaaggctacgcggacccccccgccccgccaaatgtcccaggggtttaacctttccctcccccaacccccctgtcccccatctccccatccctgttcacctacattcagcagctggttggcctccttgctggcttggttgaccccattatgagcattctgcagctccttcccggcctggccagcagcatggtgggcaccttggccaagcttctccacttcctttccagcctggtcagcagcatggttgaccccttggccaagtttctctgcttccttcccagcctggtggaccccagtgtggaacccttggaccgctttgtctgcttccttcccggcctgttcaagggtatggtgaactccctggccaaactgccctgcctccttcccggcctcgtggaccccaggttggacaccatgaactgctatgtctccctctttcccagcctgccctgctgtgtggtgaatgtcgtggccaaactgccccgcctcccttccagcctgactaacgccatgatggaggccttggaccactctgtcttcctccttccccacctgcgaggcagcatggtggacaccctggccaaacttctctgcttccttccaggcctcattaaccccatggtggaccccatggccgagcttctctgtttccttcccaaactgactggcagcatggtggaccccctggccaaacttctctgtctccttccagccctcactgagaccatggtggaccccctggccaaacctcccagcctcatttccggcctgccccgcagcatggtgggccccctggccaaatctccctgcctcatttccggcctgccccgcagcatggtgggccccctggccaaacttctctgcctccttcccaacctgaccagcagtatggtggaccccctggccaaacttctctgtctccttccagccctcactgagaccatggtggaccccctggccaaatctccctgcctcatttccggcctgccccgcagcatggtgggccccctggccaaacttctctgcctccttcccaacctgaccggcagcatggtggatcccctggccaaacttctctgtctccttccagccctcactgagaccatggtgggccccctggccaaatctcccagcctcatttccggcctgccctgcagcatggtggactccctggccaaacctcccagcctcatttccggcctgccctgcagcatggtggactccctggccaaacctcccagcctcatttccagcctgccctgcagcattgtcgactccctggccaaacttccctgcctcacttcccgcctggttggccccgtgatggaccccatgatggatcagtttgtctgcctccttcccaacctgtccagcagcgttgttgaccccatggccaagcttctctgcttcctttcctgcttgtccaataccatggttgatctcatgggcaaccttgtccatgccgtggttgagcccctggacgcctttgtccaactccttgccggtgtggctccccatgttgctaagtccgttgaaaaccttctccacttcccttccggcatgcgtgattccactgttgatgccatccagggccttgcccacctctctctctgcattgctcagccctcggttgatcccttcaatgaccttctcaatggggtcatcgctggccgcccatccagacagggcccccagtagcagaaggagggagcaggagccgaccagacgtgcaagatgcatattgctgggaaggtcgggaaggatgcagagaggagccagggaagccacgctgctatttatcctctctccctctcgccctcttctccacccctcatgactcaattacccctgtgaggcactgagttggtcttcagtcaaggaggtgtttcccagggagatttggagttgagcaatggagaggaggaggaagagagggtgagtcatggatggagaagaactctggcatctttgctccttgccctccaccccagagatgggtgtctgcccttccaaccacctcctctttcattcctcacccactgtccaggcctcctctctcgcaaacccaccttccaccatgctccatccctgggatgcaggcaattcttcaacacctcactcctctcaggcatctaagcctccagctccccaggcagtgaggggctagaatgatgggaggcaccgtctggagaggggagaacactaggtgggatgaaggagtcatcagacctcgttcttgtgggccagcccctgccctcactcattccattccagccacacaggccttctccctgttccacaaacacaccaagctcattcctgctgcagggcctttgcacatgctcctctctctgcctggaatgcagaacccagatcttcacgtggctggctcctcctcatccgtacttgacttaaatgccaacttcgcaagaaaacctctcctgaccataacatggcattaattatactctgtagtatcacccttttgttttcacagaaaaaaaaaatctgaaattacctttattttttattgcctgtctcacctactagcaatgtaaattggtcgtgttgatcactgctgtattcctagcttcttgaacactgcctggggttcagtaaatatttattgactggacaaatggatggattcgaacaggccaaggaaagagactccgagcccgagtctgggtctcacagggtgctggagggaagggcgcctgggtcgccagggcagcatagagtcccttgtggagtgccgcagattttggaggcaggatcccattcctgtcgcagaacccagacctcctgcctcccagcccttgggcaagggcagggggctgattgccacgagctggaacaggacgcagtgtctcctgaaaagccggttgaggcagccacggggaggggccgaagacccagggcagcaggagcctgtgagccagaacctgggctggggccaggccctcatccttcctgccctcccgacatggggcctcctaagccccaacctgaagccccaagtgttgacatattggctcgggttggaggggaaacagctgagagtctggcctcaggcatgaaaagggcatcggaaggaagggcaggtggtggtgggcaggcttggggcagcagatgcatctagaagccagttgggagggaggctaagaccagaacgagagccagtgggtgggtacagtaggtgcaggggtgaaagatatttgggttttggtgccaaggggagagactgagagaggggtggaggtgggattgctggtgggaaggccaggcaggaacaatgtgcagggtgtgagcagctggaggtggcagagctatgtgtgtgggtgcccaggtgtggcgagaatctgcacgtgttttcaggctttgctcaaacaaaggcgccaaggcccactcccctcagaggacccggggttcctctccagctcctggacacttgactccacccaaagacaggcatcccaggacagatatccagaagcttctgccttctctgggctctgcctatagagggtgactaagtgtgccacctctccaagcttgagctcatcaaatctgtttcccggtttcacactccagggacaaagccaaattcctgggcaaactcaggtgtggtttttctgccctggtccagggccgaaatgatggagtttcccataccaggaggtggctgggcagagaagagtgggtgatgagtgtcagaatcctaacccacccagagatcaagaggtgggatttctcccactttgaactgtgttccatcttctttttgtgtttttggagggagagtctcactctatcccccaggctggcatgcagtggcatgatctcggctcactgcaacctccgcctcccgggttcaagtgattcttctgcctcagcctcccgagtagctgggattagccgggcacctgccatgatgcccagctaatttttgtactttcagtagagacggggtttcaccatgttggccaggctggtctcgaacccctgacctcaggtgatccgcccacctcggcctccccaagggcagggattacaggcgtgagccactgtgcctggcctgaactgtgttccatcttctctatccctctccaccccatcctttcatcttctgccagcctcagtccctctcctctgtctctctattcccatgtggcacgattcgattcaggacttcagcatctggctccataactgagaatggcctggagttgtcctttctttattttatttattttttttatgaagtatcactctgttgcccaggttggagtgcagtggcaatctcggctcactgcaacctccgcctcccaggttcaagtgattcgcctgcctcagcctcccgagtagctaggattacagatgcatgccactacacctggctaatttttgtatttttagtagagatggagtttcaccatgttggccaggctggtctcaaactcctgacctcaggtggtctacctgcctcggcctcccaaagtgctgggattacatgtgtgagccactgcacccagccaaaatcagccccttttgaatcctggttttgttgaggttatatttttcacctccttgattgtacaccaaaatgtagctccctttgtttaattaatcatctgtgttttggtctcggttcgttaaaacctcctcacctgtacacttagtttactttcttctcccaggccatcaaagcaggagagcctcaccctgccctggtcccatggcaggtgcttggcaaatgaatttctcatggatgttggcggaaggaagaggttatgtcattctgccccttcttgcatccatccctctctgggatggtgactccttcctggcacaaacccccactccccctgaaccttggtcacagctgcgtgtcaacctgctgtgcaggtgatggtgcctgcctgtgagtcactgaggtgcaagcaaacccctaccccggggctgcaggggagggagctgtttgtccacttgttctttgtcagacgttcattgaaaacctgctttgtattgttctaagtgctggaggcacagtcgtgaacaaacaaacaagaacaggagccctgtgaggggcttagagcccaagggggagacatcgaacaaataaaccaatcagtagatcatgacaaactacatgaaaagctacaaggaaaagaatgggtgctgcgagaagatataacgtgaagagtttgataagattggcgatcagggccgggcgaggtggttcacgcctgtaatcccaccactttgggaggccgaggcagatggatcacctgaggtcaggagtttgagatcagcctggccaacatggtgaaaccccgtctctactaaaaatacaaaaacaaaaaaaaaattagctaggtgtagtggcgcacgcctgtagtcccagctactcaggaggctgaggcgggagaatcacttgaacccaggaggcggaggttgcggtgagctgagatcgcaccattgcactccagcctaggcaacaagagcgaaactctgtctcaaaaaaaagaaaagaaaagaaaagattagcgatcagatgaaacctgaggaattgacatttattcattcaggtatagtttattgggctaacgcctttttcagacagggtcttgctctgtctcccagctggagtgcagtgacacaatcacagctcactgcagccttgacctcctaggctcaagtgatcctcccacctcagcctccctaataattgggacaacaggcatgcaccaccacacctggctactttttttattttttgtagatacagggttttgccacattgcccatgttggtctcaaactcctggactcaaatgatcctcccacctcagcctcccaaagtgttgggattacaggcatgagccactgcgtccagcccacaaacacctttcaggtgccaaacacttttcttgtcaatgggatacagaagtgacatagatgacgtccctgtcctctcagagcttacagtctggtggacagagacagttggcaagaaaacaaacaatttttagagagacatgtgctctaaggaaaataaaaacatagacagtgtagccctagagaaattttgcacactgaagcataactcagaatggagaagtcagacaaggcttcctggaagatgggcagaaattgggaagggggtgacggctgacagtgacagagaaaggagggaacttagatgcagagtgtagaaagcctctcttaaagggtgggaaaccaagaggcagccaagggaagccctgggtgggccttccaggcatacggaggcagcaagagtcactccactggagaatccaagggacagcatggaacctgtgtgcttcaagagacagagaagaggaaagggctttcaggaacagtgtaaaaggtgggattccaggctgggtgtggtggctcgctcctgtaatcccagcattttggaaggccgaggtgggaggatcgcttgagcccaagggttctagaccagcctgagcaaaagagtgagaccctctctctacaaaaaaataaaaagtaaaaatagcctgcagtggtggctgcacatgtagtcc[134 bp omitted]ataattttaaaaagtgggattccattccagacggcagtgcgtggccgtggaacggtgatgcatagcgtgctgacgtcccatgcctctacggggatgggatgcgatggtgtcaggcctctggcttgggcgccgcccctcggcgacgtcactgggtactgtgacgtcactgggtgctgtgacatcagggcaattagcccaggacccacagccctggcgctccgcacgcacctcggtaacatcacagcaggtccaggccaatgataaccttataagaggccatgtcgaagcgcgacatcgtcctcaccaatgtcaccgttgtccagttgctgcgacagccgtgcccgggtgagggaggcagcggagggcgcgggggaggggtggaaagggtagtggggagcgtctgcaccctcacacctgtgccgtatccctaccgcccttcctggcgtgtgcaccatctagggaccaggggatcagccgctctccctccctccacacccgccagtgtgctggcagagtggggtttactgccatggcggggagaccgggcctccgcccccagggctgggtgggcttcgcgccgctatcacgcggtagaaagagcagaaacgagggccatcggaggctgcagcctgaaagtggcgggaagtgggcgggcttaggaggggcttagggagaacccaggggtgctgggcttccatgtaaaagtgatgttcatggcgcttcgcgtgaggtgagctttgccctccctgtgatgcacaaaacaaggacacttggaaccttgccggggacgtgctgaccacttcgcaggcgagagctcagggaagcctcaccaccacctgagaaggccagagtgtgcccgcagtttacagagcggccaacagaggttaagagagggcaaactacttccttagtctctcaacaagggcggcgcgcccgcgcgcgcgcacacacacacacacacactcactcactcactctagccggaggaaccaggtcttccggtgggctgcctccattcccacactgttccctcacttcccaagggcgggggccgcaggggtaggtggggctggggctttggtccaggagaccctggaagacacaggagcagacaggcttaccagcctcatgagacttgaacccctgccctgcgcatcactgctccgtggcctcaggcttcattttcccctctgtaaagtgggtttatagcgcatgcctctcgggattcagtgggaggacgcagtgaggagctgggggcagcacccagctagcccccaggcttttctccaaccgggggaccccacccctacagtggaggggaagagagtgcaaggctgggagtgctgggagaggaggaccatctgagttttcttcggaagggtcacccattgggctcagattcccacctgaaccaggtggacaaatcccctttctcccatagcagaaacaacccccaaggatgcaaacatcctcaagttcaccaataaacactaacaccttcatgaacttggacagccactggaaacacctatagtccagcctcaggccacaaggtctgtggcaacagggagaggtcagggagacagacaggccagctggcccccggctcccagccccaccaccccccaggtgcctttgatttggtgccaaaaacttggactcccactacccccttccagcccttctccaccccctgctgtctccctttcctcaggaatctgtgtaggatcagacttccctcctctattaaaatcagctcctatgtgtgggcctcgagatctcactgcgccctcacagcagcccctaggtgggggatcagccccaagaggttcattaacttgctcaaatccacagagcagcaggtctgtgtggactgagccaggcttgactttccagcttgaaactctctgccaccaggtcccctgagtctccacttctcccctcttctcaagccctcctctgtagctcaggcggctgctacctccaggcgcaggtgtttttaagtgcagtctgggagcaggagtgtgtgtggagaggtgggagccaatgtgagcttccatgggtttcacagagtatgatacacggtactctctaagcttccctgaggataagaaatgcctggagtgcttattttattttttatttttttttgggagatggagtttcgctcttgttgcccaggctggagtgcagtggcacgatctcgcccaccacaacctccgcctcctgggttcaagcgattctcctgcttcagcctcctgagtagctgggattacaagcatgtgccaccacgcctggctaatttttttgtatttttagtagagacggggtttctgcatg[139 bp omitted]acccactgagtccgatttttctaggaagagccctcctcaggtgatttttttttttttttgagacagagtctcactctgtcgcccaggctggagtgcagtggcgcaatctcggctcactgcaccctccgcctcccaggttcaagagattctcttgcctcagccccccgaggagctgggattacagtatttttagtagagaacaggtttctccatgttggccaagctggtcttgaactcctgacctcaagtgatccacccaccttggcctcccaaagtgccaggattacaggtgtgagccaccacgcctggccactccgacgactcctatcatggaacagtttggggaccactgggctaaatcaattattggacaaattcggggaacaatctacaaaatactaatgcatgtcaaacatttcctcggcttggtcataagcaatccatgtattacctcatttaatcctcacaacaaccctctaagaaaagtactattatctccccttacagaggaggaaactgaggcacagagaatgtcaccccaagcgatctatgttgaaagtacataccccggccaggcgcagtggctcacacctgtaatcccagcactttgggaggctgaggcgggtggatcacctaaggtcaggagttcgagaccagcctggccaagtgaaaccctgtatctactaaaaatacaaaaattagccaggcaccttggcgggtgcttataatcccagctactcgggaggctgaggcaggagaatcacttgaacccaggaggcggaggttgcagtaagccaagatcagtccactgcactccagcctgggtgacagagcaatactctgtctcgggaaaaaaaaaacaacggaagtacataaccagtgaattagaatctccaggaaagagcccttgggattgacattttaaacaagttcattctgtagagaaagtgggtttgggaaacactgggctaaatggttggtcacgaggggccaggagccagcaacagattctgggcagcaaagacagtttgttctctttcactttggtggtcatgcaacccattccctcccttcccccgcatagtgaccagagcaccgcccccacctgagcctaaggctgaagtagagccccagccacaaccagagcccacaccagtcagggaggaaataaagccaccaccgccaccactgcctcctcaccccgctactcctcctcctaagatggtgtctgtggcccgggagctgactgtgggcatcaatgggtgagtctactccagcccctgatcagtctgaagccttagagcccagcccctcctctggctgctaactgggggcacctccacatttccccccatcaatgctttcgttccgacgaccctggagaaatagcccggagcaaggcagacagggccccatgctcagcagcatgctggtggggaagacagtaatcaaataaagaaattagattgttcagtagagtgtgctgggaacagtgtagaatccagtggaaaagtcaggctggagagggcagcctttgccagtgatcagggaaggccttggggagaaggtgtcattggagcgggaccagagtgatgagacacagccagctcccagggcaccttgctggggaaggagtcttccaggcagcgggacaagcaatgattctggggcagaggcgagctcagtatgttcagggacagccaggaagtcagagtggctggtgtccaccaagcaaagggaaaaggagggaggccagtgagaagcccggagggggctgctacaccacagtaaggagtgtggatcttgttttactgatggacagtcgtggatgttttcatgccaagagacgtaatctgtcttgaagttttaagatccatccaggctctcacacctgtaaacccagcactttgggaggccaaggtaggagaatcctttgagaccaggagtttgagaccagcgtgggcaacatagcgagactctgtctctacagaaaaaaattgttttaattgtttaatgaaaaaataa[136 bp omitted]acatggcaaaaccccgtctctattaaaaatacaaaaattagccaggtgtggtggtacgcgcctgtagtcccagctacttgggaggctgaggcaggagaatcacttgaacccaggaggcagaggttgcaatgagcccagatagcgccactgcactccagcctgggcgaaagagctggattccatctcaaaatatatatatatatatatgtatatatgggttagggaacggattgggagagggagctgaaaaagcagttaaaggggctggtgaggtcatcttggcaagagatgcccatggccagcacagaggttgttgccttcttcccctggattaaggattcccaaccaggctccttgagggagcctcctctccattacccccttctctcccatcccttcctgtctgtccctggccagatttggacgcatcggtcgcctggtcctgcgcgcctgcatggagaagggtgttaaggtggtggctgtgaatgatccattcattgacccggaatacatggtcagtagctggcagagggcaggaacagcagggtgggactggggtgggaaagggactcagggaagctgtatggaaggctctcagctgtaatgtgagaccttcaccaaagaggggactctctagggatcctcaccctgccaccccaagactaggagccattccatcccccacaggtgtacatgtttaagtatgactccacccacggccgatacaagggaagtgtggaattcaggaatggacaactggtcgtggacaaccatgagatctctgtctaccagtggtaaggaaagcatctgtctgatgcacggctgtgacatattgaggcagggcatgtggaggtggctaaaatgggattccagcctctcacatggggtgctgaaaccacccccaaaattgcgtgtgcatgcctctaggtactaatttgaagagggaagtctcaggtccttcacccctaaaatgattaagaagcactaatctaaaaagatgcctcactgtactgaagaatgctttttctttatattttttttagggacggggtatcactcttttgcccagtctggagtgcagtggtgtaatcatagctcaccgcatccttgacctcccgggctcaagtggtcctcccacctcggcctcccaagtagtgggcaccagccaccacacctggcaaattttttgtagagatgaggtcttgccatctggcccaggctggtctcaaactcctggccccaagcaatcctcccaccttggcctcccagagtgctgggattacaggcaggagccactgcattttgctttaacgcacatttgcatgttttctcgtgggcatatcaacatgtccagaactcaactcttgattccccttcaacccacacctattcagctcccattgaccactgctggtcaactatgcctgaattccaaagggaggaaggtataatgaggcttgtgcgaacatccgaacatccgttcccatcatggcctgaaccagtgtttcagttttactttagaatgccctgggccgagagaagggctacattcagttagttgggggagtttagaattttatttttggctgacattcacctttctaatgtaaactattagcgactcctggctctgtggctgcctggggcttttacacatacacacccacaggcccacacacatgcaaatacacacaggcacactagtgaaccctgtctgggcccaggcagggtctgcagcctccccagcgcccctccccacagatctaatctcagcccttctccttgtacttactgggggtagggtgagtgataaaggggcagggatgggtgcaggaagtttgtgggcagggggcagagactggagagtcagtgaaaattgaagaaagctgcttaacccaagtttgaaatcatgacactagaaacaactccagcaccatagttatcacgcagacttcaacgtggccaccaccattaccgccacttggagtcatccctcttccccacctagctgccccctccgtccacggtcccgactcaggtcttgccttctctggtcacttgtgcaatgcagttccccgcccctccagccccctctccatccccgcactgttgggctgcacaagccaggctgtgtgcctgcactctgccctgcacctccgctagctagctgggtgaccttgggcaaggaaccaaacttgcctgagcctcagttccccgctgtatctgatggggatgatgagcaaacccaccacagcggtagctgggagcacgaatggagtgaacatgtgtttgtggacacttaaacgggcacttcccacaaggccatggccttgcacggagggctctgtcaactggtaccaccactgttgctctggcattagcaggtacaggccctgatagccattcagaacttcctttgaatgaatgaatggaatcctcaaaacagcctggtgggcaggaggctggggcccatgacagccttggggagggcctggggtcttctgggggcacagtctttgcctcaggccaactcagcaattgttgcagaggaatcgcaagtgtccctaatttggaaggcaggaaatggggggtatctgagaagagctcgttgggccagatgatggaaagtggactgacagagcaggagacaggaagaggataaccatgcatgtgtgatggctttgcagggcagcccattcattcattcattcaggcagtggaaacaggagtgcagacccgaggtgggaccagccacctgcactccagcaggctctccctctcactcccctcccctctgccctgacagcagtaaaaaaatgcaaaaaatgacagcggtagcacttcctcatcgggttgtgaaggttacatgagtttaatgcaggtaaggcacttagaatatgggcacaggacaggtgttcagtaaacacgtataaaatggctaactaaaaaaaaaacacgaggccaggtgcagaggctcatgcctgtcatcccagcactttgggaggctgaagtggggatcacctgaggtcaggagtttgagaccagcctggccaacagagcaaaccccgtcaccactaaaaatacaaaaaacaacaacaataaaaaactagccaggtgtggtagcgcatgcctgtaaccccaactactcgggaggcggaggcaggagaatcgcttgaacccggaaggtggaggttgcagtgagccaaaatcgtgccactgcactccagcctgagtgacagagtgagactctgtctcaaaaacaaaacaaaacaaaacaaagaaaacccatgaggccaggcacggtggctcacacctgtaatcccagcactgtgggaggtcaaggatcacttgagcccaggggttctaaagcaccctgggcaacaaaagtgagaccccatctctacaaaaaaatttaaaaattagcttggcatggtggtgtgcgcctgtagtcccagctactcgggaggccaaggcaggaggatggccggagccaggaagatcaaggctgcagtgagctctgattgcaccactgcactccagcctgggcgacagaggaagaccctgtctcaaaacaaacaaaccccacaaacattgattgaaccccccattgaggggagcaggctcaatggcaaaggaaacagaccgacactggccaagaatcacagaagcaaagcacccggttactcatgataaacctgggaaggaagaaagtggaacagtttattcacttaatgcttgtttgctaaagccaagtagaaaacggcaatactagatgtttagtgtgcttcaaatacaaatgtttgtcaaaataccaagtaaaaacataaatttataaaacaggaaaccagaaacctcccttacctttccaatgtaaaccatgagccactgctgccccaaggctgcctcaggcttcaggagtcctccaggagctttttctttaatgcagtgtctgttttcagggaccctcctggcctttggcagccagcttcctattgcaggagctgagggtctaggagggttcatggcgaggttgtcagagctgggaagcagaaagcagccgggcaggcctcacagtcacagagtccacgtcccgggcagcatatggagaaagggtctgggctggctgacagcagtcagcattggcgcctctgaggaggttgagggctgagttggggaggtcaccacctgtacccaggcataacaggggtggtgcaatcagcaaagggaaagtggtctgaagtggggcagtggtgaaaagctaggccagcggggtggagcccatctggaacaagtaggtgtgtggggtaggggacgcaggtggttgcaggtgggccggtacctgctcagcctgtcaaatggtgaaagccatggactatgaaggtggggctcaagcaggggagactgactcagccctgccacttccccacagcaaagagcccaaacagatcccctggagggctgtcgggagcccctacgtggtggagtccacaggcgtgtacctctccatacaggcagcttcggtaagctggggagaggtgcccagggctagctggggggatgatggtgccagaagcccctgacacctgcgcttcctccccaggaccacatctctgcaggtgctcaacgtgtggtcatctccgcgccctcaccggatgcaccaatgttcgtcatgggtgtcaatgaaaatgactataaccctggctccatgaacattgtgaggtaatgtgggcagtgacatcctgcaatgtgtggaagggagggtagactcgtcctccccaccctcagccccactggattcctggtcgcttggcttctgcttctccttcccgaaactatctgctaaaaacgcatgacttccagaggacaagcttggggagcctccccagctgcacctcagtgcctccttcagtctgacagtgtccccacagatccctctcaccctcatcctgacgtttcataaaaccaagtctgcgtgcataccccaagaggggtaagggtggaggggtggctctgcgactcacctcacagtgtccgtgcacaccttggctgtttcagcaacgcgtcctgcaccaccaactgtttggctcccctcgccaaagtcatccacgagcgatttgggatcgtggaagggttgatggtgagttgaggatgaggggctggggcaggaaggatggcagggaaacccaacttcttcccgggccttgcttactgtatggagttaagagggagagactggtttcgggaggagaggcccaccagtgcagaagtcacttaaaacactgtgcaaccctcaggcaaggctggaccctggcctgcacacatcccctcctgtggtctgtggtggtggccccaccagcctccacacctaggccaccaacttagtcctggaaaaaagaggcatgggagcttaggagcatgaaggcctcatcttggtccttctcttccccaagaccacagtccattcctacacggccacccagaagacagtggacgggccatcaaggaaggcctggcgagatgggcggggtgcccaccagaacatcatcccagcctccactggggctgcgaaagctgtgaccaaagtcatcccagagctcaaagggtatgaggacaagaagctgcaaccagggtgggggcatacgccaggaggactggactggcccggccctcagtccttaagaggaaagcaggggcctggcccagccacagggaaagggggaatggagggcaacgtccctaagttctgactcctgttcctcatgggggattctccaggaagctgacagggatggcgttccgggtaccaaccccggatgtgtctgtcgtggacctgacctgccgcctcgcccagcctgccccctactcagccatcaaggaggctgtaaaagcagcagccaaggggcccatggctggcatccttgcctacaccgaggatgaggtaggggctgaggagaggagaccctgggaggagccctctgggaagggacatgatttccacttgccagggagctgctctcaatgtgccaagtcagaaactgcagggcaggaagggagatctccctgcctcagggcctttgcacttgctgttcctttagtctggaatgcttcccttgccaggtgaccatacagtctgtccttacttcctccaagtctctggaggaacctccctcttcagcaaggcaccccctcaaaatatgttctttttgtggccatattcctcacctgaaatttcatttcatagtcactgttggccccagtggtgtgtgcactccaagaaaacagggatttaggggctgccttttcacttttgtggctccaacctggcatacagcaggtgactaatacatgcttagtgaacaaaagacaacagctcccatttttttcaatacttgctcagggccaggccatggccagatgccttctctgtgaggagtggatgccatggtcatggtggacccctgtacatccaccttggtgctgtctccctgcattaactcctgcaggtccactttcccacagtcactgggatcttttgttttaatggaatcacattgcatcacccgttttcaggattgaaaacactcctgtggcctttcatgacactagggctaaaaccctcaggtcctcccttcctgcagctccttctacctcagacactgtgctgagggccccagccggtcagatctttctagtcatctagacccaggctcatggccacccctcagagaggccctccatgctggcccattccaaacgcttgcattattcctaggaaagggatgtactggtacagcatgagggtgtttgtgacctgtgccctttggccagaccctgacacagtgccttggtcataccctgcacttggtcataccctccagtccagagactggacacagtagggctacatcaaatattatagatgaatgcatggatgggcgatagagttaagagtcggggcctcagctcctggaggtccttgctctgccggacacacttatctttgaaattctgacttccaggtcgtctctacggacttcctcggtgatacccactcgtccatcttcgatgctaaggccggcattgcgctcaatgacaatttcgtgaagctcatttcatggtaagggggaaggagctggagacttagagggaggggaactaaggggtggtcggaaggaacccccttgaacctcccgacccctcctccacaggtacgacaacgaatatggctacagtcaccgggtggtcgacctcctccgctacatgttcagccgagacaagtgaaacgggaaggtcctttctttccttcccaggggccggggccggaacatgtgcctcccgttccagcatctggctgcccgggggaggaaggacacccggggcgggcgccccacgccgatgggtccatggtgaaataaaaaacagtgctcacggctgcgtcccgtatctctgcgccggtcagggcgggttctgatccgggtttgaggcccgccccacccttactcgatcgcctgcgcccacgggcgaggggtcgcgctcgactccaagccgggttccacttcaggagaccgggaccgcgatggcagcggtagaggccccgcatggccggaagtcactccccaaagcgctgggccggcagcggtgggacccagggccggccacgggctctctgacgtcactgggcgcgacgccccgcgccgggactactgctcccagaaggtcgcgcgcgggcccccgccagtcaggtgggtgccaggccctggccgtggcgaaagagccggcggagccggagacccgctcccggagacgccgcctcgcgatccccgcgcgggcgggaccgggcggccggcatcatgaccctgtttcacttcgggaactgcttcgctcttgcctacttcccctacttcatcacctacaagtgcagcggcctgtgagtgcgggaagggcgcggggcggagagggcgcggggcccgggccgaccctcacctcccgcttctccaggtccgagtacaacgccttctggaaatgcgtccaggctggagtcacctacctctttgtccaactctgcaaggtgagggccaccgggaagccacgtgttctggcccccaggctctgcagacccagggacccgcccccgttgcctatccgcgcccccgccgccccacggtgggaccgccctcgggactccgcactgggaggcgtcaggatacctagagaggatggactttaaagagggcacgacctgagaagagacctagaagcaacttttgcgtagcacttagtaaaactgagaaaacctcagtagtgtggttggctaacaggttttttttggtgcggttaagagtgatcactgattccgtacgtgctgctaacactgcccaaggagcagcaccttcagacctgactcagatgccctgtgatcacccagaactcaaacttccagccccctcggggacccggggacctatcctctatctccccgattcctgtaattttgccaccatctggtggttcctcttccagatgggcccccagaacctgtcctgccctcttcctacccacgaacttcccacaaatcccacgtggtttatcttgatcccctcaccttgaagtgacctctttctgctttctgttctcagatgctgttcttggccactttctttcccacctgggaaggcggcatctatgacttcattggggtgagaggggccagggaagggaagggagttcaggaatggggctccctgtccccctgtgcttacttaagcctcaacctgacccgcaggagttcatgaaggccagcgtggatgtggcagacctgataggtctaaaccttgtcatgtcccggaatgccggcaagggagagtacaagatcatggttgctgccctgggctgggccactgctgagcttattatgtcccggtgcgtacagcagcctggagcccagacccctgagaagggacacctgggttccacgggggtgctggagggcaggggctcaaagcctggtgctgaaggtgtctgagtactggagaatcccatcctttgccttcctcagctgcattcccctatgggtcggagcccggggcattgagtttgactggaagtacatccagatgagcatagactccaacatcagtctggtaggcagtcgtgctctcccacatacacatttctgctggcggccatactcctccccaaggcctggccccgactttctgcctccctctaggtccattacatcgtcgcgtctgctcaggtctggatgataacacgctatgatctgtaccacaccttccggccagctgtcctcctgctgatgttcctcagtgtctacaaggcctttgttatggagtgagttgggtggggtttagggctgggtccaaagtggggtgggttatctagtctcccttccttattgtgacattttcctgcaggaccttcgtccacctctgctcgctgggcagttgggcagctctactggcccgagcagtggtaacggggctgctggccctcagcactttggccctgtatgtcgccgttgtcaatgtgcactcctaggcttggtgtctcagacattgatgtaccttttccctgcctcactccaggttttagtgaagtaaacagtatttggaaagttgttgctgcctccatttctctctcttgggaactgtctcccaataccgtgtccacctgggtctcagaggccctggttctgtctcaggagccaggtagacaagctggaagctagccagtcactgacttgtcccatgtcttgttcctcaggctcctggtttgccaggagtagacagaaggtttggatgatctttgagcagtggcagaggccagggccctcagggaacagatgatagaggggagctagaatccaagagaaggcccttggggggctcttcctcctcacagccccaacctgggcctcctcacatgggcccttcccgggctggttgcctctgaggctcctggccccagtgtccccctccaatccatcctctgtatggcagccaggggatctatctgaaacccgtctaaccaggtcatcctcccacttgcagccacttgcggccccttgttacacagtggacagtccaattgcttggcctttggttttacccaaccagcaaaaccagcttttctgaaactgctccctagaataatttgtccagccagattcttaacatcgttcaagccatggggtcagcatggggctggggggagagttgtgactgtgagctcctcagttctatggccctcagatcagatcccagcctgagccttctcagggtggagtggagagacagctgcagccaagaagcagagcagtggggcccccagcttggacattgtcctggatgcccccctccaccctcagccttccttggtccactgaagccggctccccgcctttctctgagggggatgtgtcagaagttttgaatgtcatgtttaagctccactttgatgtacaccctccccactcaggaagatgctccccatccttggtgttcccagtggggtaccccagggagtaggatagcaccattgcccctcctcctccaccaggccgttgaagttccacctgattttttttaagcttaggcctaggaaagctcactatgaccatctcgatgtttccagagggagcatttgccttcagacggcagctgccatctaggccactcttcctcattgtttggagtaaagacagggtccatgggtctcttgggagctggaagtgattgatcaccttgactttgatgtagaaaggaagtagatggggcagtctatctgggtggacttgtgacaaggtcactttctcccacacttccatgccccacatagctcttcacacatattgagacaagtgtaggatgcaaaattaccaactggaataatcccagcttacatggggttcagggagagagactggagtggctgggcctgagttggcagaggacggtgaagcctgggcggttggactgtggggagccaggcttcaggtgatcggggttatgatgggaaaaccccgggttatggggacccagaggagccgcctggcctgccgtggaagcagtgcgggctcccctgagcagaggacatgtgagctgagacctaaagaatgagtgattggggcaaggcagaggtaatggtcttgaggtcagagagggggcctgtttttcccaagggaacataactggttggaatgagttcaaggggacttgtaagactacagaagctggcaggggtcagatcacaggaggctttgggaaccaaggagagctctaggcagaggaaggacagggtcagatttggctttaggaagctctgcatggctgttgtctgaaatgggaaagctgaggccacgaggccagggctggaccagggcagggctttgtggggttaggagagtgactagaagccaagcccaggtgttggtgatcagtggctgtgtgtatttatttaccggcagggggcgctaacaggtaagggaggagcaaagagttccaggataactggagtttggggcttgtaagcccgagggctcaccacgtttccaagggagaagggaccacactgatgggacagtgggactatcagattgggtcagtgcatgggtacaggcatggggggtgatgaagaggccagtgtaggtcaccaacactgggggaagctggggacagaggtgggtctcactgcagaaacaactgaagccatgggggactggggggctgtggtcacaaggaaggagaagcccaggccctagccagagaaagccacataagaaagaggaagagaggtgaacagaggggctgggaaaggagcggcagagatgggaggtagggggatggggttaacctttcaggtgaggggtgtgaggaggggacctccaggagttgttcaggaactggccattgccgggacagaggagtaagcaggtaggctcagaaaggagacaccgctggggggtgggggatgcttgatgtggaaatgacttgggcccccttgtgtctgggagcctccaggagggagaagggtgctgagaacagagaaagcccagaggtggtagggggtgcctatcgccacggcccagcttgcgtttagatgccatgaccctgggcaaaggaataggaatcatttccccaaggcaggtttattgaggacctactatgtgccaggctgtgtactaggcactggaggtgcagccctggataaacagcccccatgtacaggactgtgggagatcacaagcactaatgagagacgctgaggacagtgcctggcaccagatacagcacagtcagcatgagctggttttattaccatcgcccaggacacaagcgtgtctttaacgaagggccctcaggcagccgtccagcctggactggagtcctaagaacagaaacaccctccagaagcggtcagctgtactccctgtcagagccccaccgccaccacaggtggcggctttcccgaggccagcccagaggactgcccaggcgctgctgctccaggaggtgcgaaccttgggaatgggggaggggagtgggcaggtccctccaagtttggggtgccgtgggctacagaagcagatactggtggggctgggactcttggttgctcagatatcttggtggctgtccagagggtcccacgagccctgcccccacctgctgtggcagttgcagggatgcttgaaggcagtcgtccctctaatagtagagttcctggtcccaccagcctgggagagagagggagaaaggagactcagtgctgggggtgccacttaggcagggccaggggctcagaggtcagtgctggttgctatggagggtcaagggcttagaggccaagtgttgaggatcaaaggtgggtgcagctgctcaaacgtttcagtcccctgcccccaggctcccagtctccacactcactccctgggcaacagcgaactccaagcttccggatctcatcatagacgaagatgaggatgccgtagggcagggggaccagccaccactggaacctgaaggcacatggcaaggtgaaggccatcccaggcctgtgccctacagccccctccctgtccttgcccctcacagcctctcaccgaatgggcatgaagttgaagatgttgggcatgccggggcagtagcacaggaagcagccgatgcagacctggaacacgatggcgatcaccaggatcttattcctgggggtgggcagaatgggacaggccattaggaattggggacgtgatggaaatcaggatactgtgggtcaaagtaggtcagatgtcagcagcagcagggaggtgttctacacactgaacactggagtggcccgggcctctcagcaccacccctttagtgaaatgtggagggggccgtggggggagttattggccagttagaaaggtttttttggcatgtcaccatctggcactggcacccgctggcatttgccggctgttctaaaccacagtcaggatctgatgggagttgggaccaggggttggagggcaggaagagggccagccagggacacctgaagaagccttgctggaaggcagagagacggcgcgtcttgcggatgaggacatcggcgatctggcacacctcaatgctgatgaagaacacggtgtagcaggtgtactgctggtacaggcgctgcccgaatgtctgcaggccaggggcaaacggaaacagcctgagtccagcctgagtcccggcggagagcctctgcagcccaccgggcatagggtcccagggccgtgaacccctaaatgctctctctgccttgcatcagagtgtgggggtggggggaaggagagaggcagggtctgccaggtgtgcaggaccccagaacgtggggcccagaaacctcagcctagcagagcttggatgacagtggccgggaaaactgtaggctgggccgactgctttcatagtgaaaggggggaggcacccaaaagaaagggcctgggaaaggggaattgaaatcctcagatgggatttgcaaagtccagtgactccaggggccaggcagatggcaaaaataggtgaggcagtcaccgcgggcctttgggaaaagagggcagatgccccatttaaagggggcagccactatgcagcccatttcttcaacacagctacttttttttttgagatggaatctcgctctgtcacccaggctggagtgcagtggtgcaatctcagctcactgcaacttccgaatcccaggttcaggagattctcctgccttagcctcccaagtagctggaattacaagcatgtgccaccatgcctggcaacacaactcctaataccagctaactgtggggatcactgactgctccaggtgccgagtgttgcacgtgcattagctcatttaatccgctgggtaaccctaggaggtaaatcagtggtgctggaacttgaacatgcatgagaatcccagcaagggctcccagagggctgggatagagcctgagaatttgcactgcaaacatgttcccaggagatggtgatgctgctggtctgggagcaaactgaaaaccactgaggtagactttgatattctctccactttgcaggtgagaaaacaggcacagagaggcaaagcaacctgcccagggttacacagcttgtgagaagcagtaccagaccataagtccaggcagtctggcttcagtgtctaccttaaccatgatagtaaatgtttaagggaagtatcctcgtctgtatgtaactctacaggtgaactaaacacatctgctggccagatctagcctcactgtgctccaaaccttcattaaaatagaccacatgtgcaaataccctgtgggagtgatgctgtagggaaaatagcagaataggggcctggttccacatctgagatgatgcattagtgtcagggcagagacacccatctgcagttgcgatcatcagaagcaggagtttggagctggagatggtgggaaaggcccttgcccccccgaactggcagggagtctgggggtccgggatgctctggctgaactcagtcacacgtggaggaacaagtgggccgcacacaaggcaagttgccctgggaaggagggagcccagggatgggatggggcggggcagggctcacccactcctggccgtagctgtcctgcagatcttgtaggtggtggtcctcccactgcgcccgcagccccacgcacagcagtgggaaccagccctcctgggccattgccgtgaagtagtcagtgaagccagcaaaggactgaatggcacctggagagagacaaggggacacagggagacagagatggacacagagacagggacacaggaagagagggacatggagagacagggacacagatacacaaaggtcaaggacacacagacagggacacgggaagagagacagggacacagatacacaaggtcaaggacacacagagccagggacacagaaacagtgacagagacacagaggcagagagagaagcagggacagagagacagaggcagggacagagagaaaaagacacatccaggacccaaaaagacagaaataggcaacaactcagagacagggtcatggagagcaaggtcagagagagagcagggacacagcagaaccagagagactgtcacaaacagagagggacacggaggacaacggagacccaggaccaaatgcagacactgaggtccagaaccagccggagcccaaggcagggcctggggcaggcgagcagcccagcgcagagccccccacctccaggctccccggcccacgggcacccaccaatctggaagtaggagtaggcagccaggggctcgttgaccaatctgtcacgctttgggttgcgtggacgcaggtgcatgatgtcactctcggccttttcatatgccagggacacagatgggaactggccaggagtggaaggaactgggactgagggtttggctgggcccttgtcccctccacttcgggtcccccttcccccacttgtgagcaggaacaggactgaggttagcaggcaggacctgcagggacggcacagccacaccagcctggacagcctgggccccactggcccctgggtgttggcatcctggtgcccatcttcgtaagaacatctgcttttatcttctccctctgtctccctccctctctttctctgttcctcactctgtttctctgtccctgtctccagtgtaattctctgtgactgtatctgctcttgtgtatttctgtgtcactccctatctctgtgtatcttcagtctctcagtgtcgccgtgccccttcatctgcttgtgcctagagtggcagcagagcatactgaccacgaccacaggctgtgggacctgtgactgctcaagctcaagtcacagccgggccacttatttgcccagtgacctgggacaatccactctacctgtctatgccttgatgagctcatcagtaaagtacgggtgatagtaacaaaactcatctcatagtgtggttatgagtacaaaattaaggaaatgatggtgtgtctggcccagagaaagcactgtgtaaatgttaccgaataaatacctgtcaacacagctgcgcctctggctgcattcgtgactgtatctgtggttcttttctgtctgtctgccatggggtctatctgagggggtttatttgtccgtgtctgtttaggggcacgtgtctgtgattcaagtttggccagatacctgttctgtttccatctctgtctgagtatctgtatctgagtcatgtgtgtgcatgggtcggcccgggcctacctgagtgtccgcctgtgtgtgcatggctgtatgtccatttaggtctgttcacctgcctgccacccatgtgtcctgcactggctgtcattgcacacacaggtcttgtctgtcactctgtgcccaagagtgtctgtggtggtctctgtccctcctgtccatctgcaagcaagtgtctctgggcaccctgtggatgggtaccctgggctgtggacttacaatgtcagtgcagagttcgatgaagaggatggtgatgcacccgaggggcaggggcacgctgacggtgatgtagatgaggtagggtgtcagctctgggatgttcttggtcaatgtgtaggcaatagacttcttcaggttgtcgaagatcagtcgacctgtggggtagggtgggcacctcagcctcctcacagccctctccctcctgtgcccacactgcctgccctccccctggcgtggctcggaccctgctccacgcctgtcacaatggaggcaaagttgtcatccagcaggatcatgtcagctgcatttttggcagcatctgagccagcgatgcccatggctactccgatgtctgccttcttcagagctggggagtcattcacaccatcccccgtgacggccacaatcgcaccctgcaggcagtgggtgcaggtggtgggtgggtggtcagtgagaggccggtccaagaccagccccgcctgtctgcccgcctgcccaccctcatcagcagggctcaccagccgctggcagctctccacgatcaccagcttctgctgggggctggtgcgcgcaaacaccatctcggggtgggtgcgcagggcctcgaccagttccgatgggtccatgtccttcagctgcatgccattgatcacacaggcacgggcatccctggggaggagatgggaggacctcgctgggacctcggtctgtgccagatgtggggagaaccccggggaggtctgggggggcttacttgcgattaacctggtctacgggcacacggaggcgggcagcgatgtcctccactgtctcgctgccttccgagatgatgcccacactggctgcaatggccttggcggtgatggggtggtcacccgttaccatgatcacctgtagggggaaccagtggatcactgaccccttcagatcagcccaatctccctgtcctccctgggagacatctgctgatacacgtgttcatttacttgaccaagcgtgaccacctcctacgtgcctgggatatagcagagacaaaagagacaaaaatccctgtccttgaggagctctagtgagggtgacagaaaataaagaaacgaattatatagtgtgttagaaagtggaaaaaaacatattaagcttggtgaaggaaacggtgactcgattttaagtgtacccagggaagggcttattgagaaggtgatatctgagcagagacctgtaagaggtgagagagtcagccacgtggaaagctgggagaagagtgctcctggcagggagaacagcaggtgcaaaggccctgaggtgaggacaggcccgaactgtcggaggaacagcagggaggacaccataactgcagaggagtgaacaaggaaagagggctaacgaacaagcttagaaaggtaacaaggcccgatgtaacagggccgtagagacacgggaagggcttgggcattgcctgcctggccttggctttcccacccttgttttgtgtttggggaaccactcctctcccctacaccatcagttgcagtgaggtccctggctaagattgggtaagtaagcccagacctggccaatcaaggtcttccatcccccagccccagtgactggctcagggataaatgagtgacccaatccagtgctactgcaaaagaggcactctctttttgtggggtggctaagcaggtgggagttaagtttgagctgctggagcaggggtgtgtgtgtccccaagtgaagggagtgcctgcaaataaagccagcaaagagaacagcagagctgagacatggagaaaggaaaattcctaatgacactgagctcctggatctggctagacctgaagcttaattccccagaatttttcagtatcataaaccaatgcattttggttcaagccagtttcaggtgggtttgtcatggggttcttcaacccaaatcctgctgccatcctctgtcctcactccacttgttcctccccacagtggcatacccggatgcctgcggtgcgacacttgagcacagcatcagggacggtggcccggggtgggtcaatcatggatacaagtcccgcaaagcagaggccgctagatggaaagttcatggcctctacgtcgaaggcatagccaggcgggtagtccttctcattcaggtagagctggcagaagcctgaccggaaacggggaagtcagggaagagccctgggcacaccctttcttagcagggccaggaaatgggtaaaataaccaggccccttgcaccaaacacctatggatgcctgaccttgtgctgaccccttcactcacattatctgaatctaccctcacaaccaccctgtgaggcccattctcatcttacagatgaggaaactgaggctcagagaggggacatttcttgccagaggtcacacagcaagtaaaaggcccagaattggaccacagatctgctttctagggtagaggcagcgaagtttaaggcgtcaggacaaaaattgggagaggttagaggtcaggatacggataaaagtccaggtgaggactggggtcaaggtagaaagtgaggacagacaggggtcaggactggtacagggaaagtcaagggtgaggctgtggactgcgacaaatcagccagcagccagggatgaggacggtcagggctgggccgggagtggtgggcagggtctgtgctagctcctcctcgcacctggagtctcctcccctgcccaggggtctcaccgagcacgcgttcgcccaggcctcccaggctgaggtaggcggtctggaaggcctcgcgccactgctcgtccagcggcagctcctggcccttgataaggatggagctgcagcgctccagcacgcgctcgggggcgcccttcatcaccagcaagtgtcgcgggtcccgcgggtcctccagcgtatggatggacagctgtgggcgggggggagaggcgaggctgtggacgggggaacggggcggggctgtggacgagggaacggggcggggctgaggagaggggcggggccgagagctcggtgcgggctctgagagctgcggggaagggtgaaggtggaagatggaggccttgtgtggaggggtccttggtagaaggtaagcgttaaggcggggctaggtgcagatttggagtcctggacgcagggaatgaacagaattagggtgcggagttgggctgggggcggatttggagagcgaggtgctccccatggacagtcccgccgaggagaagctgtgggcggggctgggtggtgggcggggccttgcctctggtggacggggccataggcggagcgggagatggggtggggtttggctgcggagagaaggggcaaggagcgaagcccctcgtggcccgctgatgtgggtgtggcctggggcggggcccgaggtgggcgggcccaggccgtgggcggggccggctgcgcacctggaacttgttggtggagttgaagggtatctcgcagacttttgggaagcggtcccggtagcccatggcgttgcccagcgtcagctccgagaacttgagcagcgccgtctccgatgcgtctccaatcacgatgcgctgggagcggggaccggtgtcaggggcgaagccggctacaccagcctcccgggattccctggaggccccctggctctcaccttgggcacaggcactgcatcctggccggacttgaaggcggcgcggttgcacagggtgagcacccggcacagcgcccgccacgtctccgaggactggtcaaacgtctgccctgcagaccaggcgtccaggctgggtcccgcacggcggctctcccggaccagaaccgagccccctcctcctaggctcatatcgcgggccccctccccagacctgggtggaattgggttccacccaaccctgagggacccagcccccggatgacccttccctctagacccggtagcgagtctcctttgagacctggagccgagccgccccgccttcgtacaaagccctccctacctccctatccctcttcaggtctccaccatccaccagatcctgccctggcgcctgtgccctccctcccccacacctgactggtcttccgtggtgtcagctgtgtggatgtggttgtcaaaccacagatgggacacagtcatgcggttctgagtgagagtccctgtcttgtccgagcagatcaccgaagtggagcccaatgtctccaccgcctccaggttcttgaccacgcagttcttactggccaggcgcttggctgtcagggacaggcagacctggggaaggggtgagcaccgcaggctggggacccaccctggcttccagtcctcttccccgcgtcaaagaacggggaaggctttaccccagccgcggggctgcgtgtgcaacgtgcttctgcaaacaccaggtgttttcttggccccagcttttgttcagccagtgctttgtttgggactccttccccagtctgcccagatacagtagcgaggcccctctctgagctgtcccagccgaggttctgaaaattctcttcacacaatcaaaatgagaagaggaaccttccccgcacctccctggggactggtctggagctgggtgctgactgtggaaggtctggtgacatgctggctgcctgcacaggacatcagcctcttccagttaaggacccggcctcgtcatctctgcgccctcaatgtgtggcacaggacttgccccagggttgcctcgggaaggacttgctgaatgagtggatgatgggaaggcaggagaatggatgggagctaagtggacagatagacaggcagggaggtgatgggggaaatgtggaggaaagaacagatggttgagcaggcccctcagctccctgcatccccgcctgcccccactcactgtgacagtggccagcagcccctcaggcacataggccaccacgatggccatgaagaagaccatggcccgcaggaaggtgtagccaatgcacatggccacaataaaaaatgtggcaccgaagagaatggccaggcccgcgatgatgtccacaaaatgctcgatctcgatagcgatgggtgtcttctcgttttccacccccgacgccagcgatgcgatgcgcccaatgatggtgcggtcgcccgtgttcaccaccaggccctgcacggtgcctgcaggggggccaaggcgcgactcagggatagggggcggcagtggggtgtgcactgccgtgtgagctgaaggacagccagtcactgccagtggaggatgtgacctgggagagggtagtgacagtgggagacagagaagcagtgtgccctggggaggtggcagtcacggggaggtggcagtcatgcaggagagagacagggaggctgaagccccctgtcctagaagatagcaggagagaggccagtggaggcagcagttactgggcaggcaggcgggggcttcacagaccctcaaggcacatggtggagaagaaggcgatgttgcgggtctccagagggctctcgtgcgtgcactcgggtgagcgggtctgtggctcagactcccctgtcagcgaggagttgtccaccttgcagccctgggccgccaggatgcggatgtcggcgggcactctgtccccacctttcatctccaccaggtcgcccaccaccagttggtcagcgttgatctggaatttgtctccatcgcggatgacagtggcttgctgcggggcaggggcaccaaagttgaggtggacgggggtgggggtgggagctgctgcatgtggggaggtaaaggatgaggagagctgggacccatggggagagatggaggccacagatgagggacaggggcctgatggaaggaggctacaggagcagtttggagtctctgggatctggagtggctgggtgctggggaacccacctgtggcacaaggttcttaaagctggcgatgatgttggtgctcttgaattcctggtagtagccaaagcagccggtgacgacaaccacagcaatgagagcgattgccaggtacagctggggacagggaaggggtggggttattcagaggggccggaagctgcctgcctgaggccaccgacctgctccctggtgccctggttttcttggttttccccatgcttttccccacctactaggaagctccatgcaccattccctgtagcctttagccccctcccatgtccctcatgtcccacactcgcctgctctgtcttctcagtgtcttgtgtttctgtgtatatttcatatcctctggccctgaatcctcaatcttccatgtccccatatctgtgacttgtgccccaaatcactgtgtgccttggtctgacgtgttcccttctcctgtgtccccaagccttgcattccccatgtccactgtcccatgtctcctcctgtccccatggcctgtattccccgtgtctccagtttcacatcctgggttttccataatctgctgccaccctctgtgtgtcccctgggcccccttgtccctgcatcctcacatccccgtccctgcgtgtgctgcagaccttgtacgtcatggtctgtgtcctctgtggccacggcccccatgttctagctccccagtcactgtgtcccgtgtctcccatgtctgtgtatctccgagttcccatcctgtgtcccatggccatgacttttcgagcctctgtcccatgtcacatgtccctgagtccccatgtcccttgccctcatctctgccatatgtccaatgtcccttgccctgcacctccatttcctctctgtctctgtgcttctatgtctcatgttttgtgtctctctatgtgctgtgtcctgaggcttgggtccctgccctggtgtcctatgtctgagtcccagggtctcctattccccgtgcctcagtctgtcctgtgtctgcactgcatgtcctctgcttccaagtcccatctcttttttttttttttttttttttttttaagatgcagtctcgctctgtcgcccaggctggagtgcagtggcatggtcttggctcactgcaacatccacctcctgggttcaaatgattctcctgcctcagcctcccaagtaactgggattacaggtgcccgccaccatgtctggctaatttttgtaattttagtagagatggggttttgccatgttggccaggctggtctcgaactcctgacctcaggtgatctgcccgcctcggcctcccaaagtgctgggattacaggcatgggattacacgcccggcctccaaatcccatctcttacgtatcacattgccatactctttatgcccccacctatgtccccatacccaagattcaccccagtgtccctgtgtcctgtgtccttgggtctgccccatccatatcccaatgtccttcaccctccatgacccctgtcttgagactgcctttcgtgttcgtctatccccatccttctctgcccctcttgtcccaagtcccaggctcagtgtcttccatccccaggtccccatgtcctgagcctgtccccacaacatggctcacattgtcgtcggtggtgaggtccccctcactagcctggatggcaaaggcgatgaggcagatggcggcggcaacccacatgaggcactgcaggcccccggccagctgcctcgcgaacttgacgtactctggggtgccccgtggtggccgcagtgcgttgggcccatcccgcagcagcagctcagcagccaggctcgcagagaggccctgggacagaggggcagggcgaggcggtcctgggggctttcctccacatgcacaccccgtggaaagccccctgcttcagtttcccttctccagcttggtctgtcctgctccttctcatctctttgtctcttggttcctgcccccaccccatctctccctccctccttcatctctccctttgtctctctctcctcgctcccctttctatgtgtctctctcctgctgctctctccttatttgtctctgccttctctgtcttgctgtctcttttcagctactcctctctccgtctctgtgtgtcaccctttctctctaatgctttctcccttctctccctctccctctctctccctctctccatctccctccctctctcctcccctccctccatcctttcctctctccctccctccctctttccttttctgcctccctccctctctctatttctccatatcttcctctcttcatctctccctctctctccctctctccatctccctccttccatctccctctccctccctctctcctcctcccctttctgtacgctcccagtctccagctcaccttggtggcactggtctggtatttctgttccagctccgccactgacagctggtggtcgttctgtgtggtggggtggggcagggtgcttgctctgggctctcctggccccctccccgcccactgcctggttcccagcctaccctccagctcccgcccctccccagtcagagctcacaatctccatctccttcttcatgttctccagcttctccttcctcttgccacccccgccacccgccttcttcttcttgctcatcttggcagccatgtccccgccagggccaggacccagctccaccgagtagagctcatagttctcctgggaatggacaggatggagggagggagaactcagattccactgcaacccctgtccccactgcaccccggacccctgggccccactcacggccttccccatggtgcccggtgcctgtgctcccacccaacagagcctgggcccggaccagtcctgatatacccagggagggcggtggggtggagcagaaccgcccgaccacagctgattacaggctccttggggtgacctctaggcctgggcacctcaggcattccctcctgggctggcccccccctcccctgcccagatccccccatgtcaacctgccctgagatcagggagcccctgggaaccgctgcagcaacaagaagagcaaacataaggtgctcattatgcgctgggcattgtgctgacggcttccatgtgctaacttatttaaccttccaataaccctttgaggggacaagaccctttacagatggggaaactgaggcatggaggggttgagtcattctcctatggctccatcacaggctaggacataatggagtgagaaccagatcagctggctgcagagtgtcctctttcagtctaaatagcacgtgcctgatcaactggaagaggagggtgctcccacactctttttttttttctttttttttttgagatggagtgtcactctgacacccaggttggagtgcagtggtgcaatctcagctcgctgcaacctccgcctcccgggttcaagtgattctcctgcctcagcctcttgagtagctgggactacaggcacatgccaccacacccagctaatttttgtacttttagtagagacggggtttcaccagg[137 bp omitted]actctgactattcactatgggctgggtgtgctctgtgtgtcactcaaatggtttccttagcatctaacagcagccctgtaaagcaatattctcttcttagcccccatcagggactttgcagaagatttcaacgtctaagaattagggacagggttccagcccgggcttgaccccagggcttgaccccagagcctagctcttctatggcaccaccaatggaaaaacccaaacttcactgcagcagcaccacacacatgccaggctctgcacgtgtgacctcacgggtctttgcaaaaaaccctgtgcaggcagaactatcattcctgttgtgcagagggggaaactgaggctcacagggactcacatatccagctacagactttacagctctcaaccattccccgtccctaccctagatggggaaaccaaggtgcaacatggggaaaggatgtgtccaagggtcttggcttgatcttggtgttgggtgacagatgccaggaggcctggggactccctcctcatccctcaggtagggacctccatgggcagcagcagcgaggggctgggccagtggaatggtggggaccttggtatgttatggggtgagcgtgtctccaggagcaggtgagcgtgcgcctgataagataactgccctggcaatgtccttctctactggggcaggtcacctgggaaactcaaagctgttgggcagccagagctcctccccgcacccacacggctggtcatccccagcctgctagaagaaacctccaaagaagaggtggcgtggggccacatgctgtccttgtagtgaatctactcgctcactgggctcccatcagctctgagccatgtatgtcaaacagcttgtgtcaccccctgcttacaaccctccaaagccttcccttcccactcagaataaactctgcactccttcctgcaacatctggccctggtcacctgtcctgcctctgttgctgctaggtttccaggggcactgacctctctgctgcactttgcacagaccaaggtcgttcctgcttcaggaccttggtacttacagttccttctgcctgggcccccttccttagatgtctgcactggctttctcacctctttcaggtctcagctcaaatgtcacctcttcagagagtccattctgtaatactgcacactgtgttctgttcctttaccccactgtatttacacctcctactccaacctgacactgtgttttctttttatttgtttggtgttcattagaaggaggactgggccggacactgtgactcacatctgtaatcccagcactctggaaggctgaggtggacggatcatgaggtcaggagttcgagaccagcctggtcaacatggtgaaaccctgtctctactaaaaatacaaaaattagctggatgtggtggtgtgtgcctgtaatcccagctaccagggaggccgaggcaggagaatcacttgaacctgggaggtgaaagttgcagtgagccgagatcatgccactgcactccagcctgggtgacagagtgagactctgtctcaaaaaaaaaaaaaaaaaaaaatagaaaaatagatagataagagatgttagacagatagatggatacataaatgatagatgattgatagattttttttttttttctttttgagacagagtctttctctgtcgcccaggctgtagtgcagtgtcatgatctcggctcactgcaacctctgtctcctggattcaagcaattcttgtgcctcagcctcccaagcagctgggattacaggcacccgccaccatgcccagctaatttctgtatttttagtagagacggggtttcaccatgttggccaggatggtctagaactcctggtctcaagtgatccacccgccttggcctcccaaagtgctgggattacaggtgtgagccaccatgcctggccagaattttttaaatttttggctgaatcatttggaagcaagttggagacaggatcccctttatccatacttaggcatgtgtcttctatgaataaggacattttcttacataagcacagtctaataatcaaattcaggaaattaacattaataaaacactagtaaataatctagagcaagcttgtccaacccatggcctgcaggccatatgtggcccaggactgctttgaatgctgcccaatacaaattcgtagactttcttaaaacattatgagatttgtttgcgattttttttttttttagctcatcagctattgatagtgttaatgtattttatgtgtgacccaggacaattcttcttccaatgtggcccagggaagccaaaagattggacacccatgatttggaggatttatttgaatttccccagttttcccactaatgtccttttcctagtccaggatccagtccgggaccacacctcacattttggcttcctccattgcgtaacaattcctccatctttccttgtctttcatgacctgggcgttttggaagagtatgattcagtgattttgtagacttcgctcagtgtggctttgctgctggttcttcgtgattaagttcgggttgtgtgctggcaggaacacagaagggatgtgtgtcccccccatcccctgccccagagcatcatcgtgtcaggccatgccccattttggagtctgtaacttgtctagagcagggtggacatggtggggaggggtctcaagagccttagggagtgatcaggaaaccattctatgccctctttaatttttactcaagacagtgccacagccagggctggcacccagctgccctggtagttaaagtaattgaaagaaatacagccactgcctgagcccccagcacttcccctaagactccagacctcccacacccaaccccttaaagtggatgcctgtgccagtcccaaggccttgtcctttttttttttttttttttttgagacggagtctggctctgtcacctaggctgaagtgcagtggcacgatcttggcttactgcaacctccacctcctaggttcaagcgattctcctgcctcagcctcccaagtagctgggactacaggcacgtaccaccatgcccagctaatttttgtatttttagtagagatggggttttgccatgttggccaggctggtctccaacttcttacctcaagtaatctgcccacttcagcctcccaaaatgctgggataacaggtgtgagccaccacgcccagccacccttgtccattctgaccatcccctgctcagctaggttcatgggtaaatacttttacctactcccctaattttgcagtcttcagatggtatgcaagttgtgtgtttttgtggggaaggtctttgcttgggtcatttattattttaccgtgtgtctaagcaatactaacccctgtctctgggaggtgaacactgaggccttagtccacaggcaggatctggataagttgggaagtgttccaagtctttggcaccctggaatgcagcctgggtggaccgcacgatgccatttcaggcggatggacaacccctagcacaactcaggggcaaagaaacttctcacaagaatgttgcaagtgtgacatggtccacagtagtgcaagtttctctgagcctggggcacacagaacgttggaaacttttttgagaacaattagtggtcagaattgaaaaaaattttcttttcttgagaaagaggggcagaggacagactattaaatggacggtggtccaggagcagtggctcatacctgtaatcccagcactaggaggctgaggcgggcatatcactggaggtcaggagttcgagaccagcctggccag[136 bp omitted]gggtaaaaccccgtctctactaaaaatacaaaaatcagctgggcatggtggcgcatgcctgtaatcccagctactcaggaggctgaggcagaagaatcgcttgaacctgggaggtggaggttgcagtgagccaagattgcgccattgcactccagcctgggtgacagagtgagactgcatctcaaaaaaaataaaaaataaaaaataaaaaaatttgccaagtgcagtggcgggtgcctgtagtcccagcaactcgggaggctgaggcaggagaacctcttgaatctgggaggcgcaggttgcagtgagccaagattgcaccactgcactccagcctgggcgacagaacaaaactccgtctcaaaaaaaaaaaaaaatgtggatggtgaacattacttgggtttgaaggggaatttgaacaataatgtcctagaattgtagccatacacactcttaggaacccagcgccctgtaaaccttgatgggatcagacccctggctattcctcctccttcccatgttctacttttccctttcatgctttgggatcctgcccgcccaggccttctgcttttccaaaggatcatttcaaaacctcagcacatgcaatttcctctacctgaagtgtgcaccctacctcctccccatgtttaaccactcctcacctttcctgttaagcacagatgatccttcctccgggaagccttggactacccaccaggctgagtcaggcacctccctgggcttccacagacccctggggtccccatcacagcccccacctccctgcctgtgcttcccccatcccagtcctgacgactctgaccctataattcctccatcacagccctgaccactctgggctgtcatgctttggtgacatttcatctccccctccagatccatgagggcaggacccaggatgtctcagtcaccactgtgtgccctgcattgcctggcccaggctggccttggggagtgtttgccaagtgacaggagtcattgtgactgtgactttgggtacagtgtttgcatctccctgataagataatgggcccagcaatgcccttcacctcctgagcaggtcaccccgccccctcgaccctgggaggatgaaagcaaggggctgggcatacagggaccttgcttctcccgcctctccaggccaggtgcaggggcaggtggtcagaattgaaaaaattgtctaggagtcaaggagttggcccccagcccagctaagctggcagccaggcccctgcgttctgtccctctcccatctttgtgcagattggaaaggtcagccatcctgggctgggtgcagagcccttcacttcttcaggaaatttccaggctgtacttgctctgggattttaaaaaatcatattcagggccgggcgcagtggctcacacctgtaatcccagcactttgtgaggccgaggtgggcagatcacctgagatcaggagtttgagaccagcctggccaatatggtgaaaccccgtctctgctaaaaatacaaaaatcagccaggcatggtagcgggcgcctgtaatcccagatactcgggaggctgaggcaggagaatcactggaacctgggaggtggaggtggcagtgagccgagattgtgccactgcactccagcctgggcaacagaatgagactccagctcaaaaaaaaaataaaaataaaaaaaataagggtactggtggagagacttcctccatgggatggggcaagggcagagcgctgatgtccaaatccaagctcaaagattcccaggggagcaaggaggccttgtggttcctagaactgtgaagggtacagggcgattgcaagagggcttctggctcgtgggtctcctgcttctgggctgtctgctgtcacaagaacctgcaggatcattaacaagctcagaacgatggccctgatgctgaagcccaaagctagcctggaatttctctttgtgctgacctcgttttccaaacggctcactatccgtgcctatggagatgaagacaggccgatgggggtgtttttctaagaaggggtgaaattgcagaagggccacctggagtgaaactgaaggccatgatcagggttgggggagggaggattcagcagaggagaggaggaggcaatgcaggaagacagtgcggggatcctgggcacgcccaggtaggagggcatgctgggagaccttgggaagaagtggggttggcagactgtgaacaaagtggggacaagtcccagggcagcaggaagggtgggatggagaaggggttggggctggtatctagagaagaggggaagcttccgaggcatccatggaaaggggtataaggtgggtcaggggatgtttcaccatgggggacagagggtcactctccacccaccaagcaggatggcacaatggcaagtattcctagcaggaagaaacaaaagatgaaaaagatgcagagaggcaggcagtcattcacaggaacacttaaaggcattttgtagatggtcatctccatgactttgacctctgggctccggaggtcagtcacacaggcatgaaccctggtggagggaggggcagggtctgcagaaggactgagaaggatcagcagatgcgaaggaatggggaccaacagaatcaatcccatcaacaggaatgtgctgggaacactcaacccacagtgaacttggcctttgttgtgggaaaagaaccctgcaatgcccccactgacctctatgatacccttgctagccctcaaagtatcctgttggctgctttttttttttttttttttgagatggagtctcactctgtcacccaggctggagtgcagcggtgtgatctcagctcacaacaacctccacctcctaggttgggatcctcccacctcagcttcttgagtagctgggattacaagcatgcaccaccatgcccagctaatttttgtatttttaatagaggcagggtttcaccatgttggctaggctggtctcaaactcctgacctcaagtaaatcacccaccttggtctcccaaagtactgggattacaggcatgagccaccgtgcccaacccctgttgtcttcttctgtctccctaaacccatccctgttctccaggaagcactacctcttggtttgccagtgcttccagttaggtctggtcctagcaagttattctgaactcccctttcagtctaaaaaatgctcagtttgaattttaaatccagtcactcattgctttaatccagtcactcaatggggataagttctgagaaatccagtcactcaatggggataagttctgagaaatgcattgttaggtgatgtcatcattgtttgaacatcatagcttgtactcacacaaacctaaatggagagcctactgcacacctaggctatatgggatagccttttgctcctaggctacaaacctgcacagcaccttactgtattgaatactgtaggcaacttataacacaatggtaagtatttgtgtatctaaacatatctgaacatagaaaagatacagtaaaagtacagtataaaagataaaagtggtatacatctgatatgatttgctgtgtccccacccaaatctcatcttgaattgtacctcatctgcctgaatcagtgctgaaccactgaggcttaaaacagtgcctggcactgttacccaataaatgttcattgaatatatgagagtcccatggtatctggcaacgtggacacacaggagatgtgaacatgtgggcacacatacgtgcatgcaacagatgaatcagaaagtggaaacctcctcataaactttactgctcttaaaaatgctgatggatgaaggggtgggttacagattaatagcatctcaaggcagaagaatttttcttagtacagaacaaaatggagtctcctgtgtctacttctttctacacagacacagtaacaatctgatctctctttcttttccccatatttcccccttttcttttcaacaaaaccgccatcgtcatcatggctctttctcgatggtcgctgtctcttcggagctgttgggtacccctgcagactaacaacagacagaacaggcacacaaggattaatatgaaatttataattatagtacttccgatggtcttaacccaagtgacagggttaagatttacgaggccatcagcaactcctgcaattgcctcagttcctggcaccaaatttaaatgggcttttgatgttttggaaatttgttcttttaatttggaaatgtctaaagtgagattatcttctcttccctgtagatggcgtctaaccatgtcccagtgatgctcagactcattataaacttggggtgtaatacaaaaatctgacgtattccagtcacactgtaactggaaacgatgttctaagctcatgagcctgtctcccatccaaatgacagtttgtctaagatcattaatttggtttgccaatttttgatcaatactagattgtgaattccacaatcttgtagaacttttttgccaatcattaacaaagtttactgactgaacagaagagtgcaatgcaactcctgccacagcagccatagctgtgactgcaattaatcccataatcactgtaattaaagtaaaaatgaatcttttggatctatttaaaacgccttttaatacttcagtcaaaatatgaacggatggtgaggcctcccacagtcggtccatggacacaaggatccacacgccttcccttgctctcaccagcagaatacggtgttgccaattaaaagttgaatcaatgcaagtaaacaatctgcagttttcacaggttatagtttgagagtctggtttaataactatatttcctataactagcatataaagggactttacacagctttgtaaaggaactgttagactggaatttaggtcgatagtataaaatggcttatgatctcgtttctaaagtttgatttccagaccaaattctaatgtagtatgaggctacactaagcctccaccattctggatgttcaggaccagaaacaggacttattatttttggtcatggggtagagattcctttttctccccatttccaagggtagaaagactgtaattttttatgcttatgttcgtctaaactttctatgaagtcgctatcaacagttggactcacttgtgcactgggacacgactgagtttgtcctgtgcaattgtggtagaattgacctcgaggtgcccaatctataatagttcggaattcactgttttgtaatatcactgcactattggccacacattcttcccaaactaaagcttctacattttttgatcctttggaaatttcctcggggcaaggtttccctttaggtctaaattttaatgatctttgataagaaaagtcttgtaaataatttacctgtggcctgagcgacatcccgcttaccatgtgataagtgaatcttctgatgggactgacagtaggtacttctaccaaccaattttggactgcaggcattaaacatcctggtgctctccccaggcaaataggaggataatgatacccaatgaaaatatttatcatcatcccttcttcctcaggtttggcagggcaacgatcatctgttggaccaggtacccatacactatcattaacatatacttccataggattatccatccatgtgactgcctgaattaagggcgggaaaggcacataggcccagtaattataattagctgcagctgctcctgcaggcatagggagacttaccaccattgatacaatcatcaaagctgcaagcagcatactctctggagtttgtgtcacctttgtgttctctagatattttgtagctaactgtgtcagcttctttaattgtgcccaagtcagcagctctgccttcttggtggatggcaacttcatctgttcttctgacatcaccattctgttcatcttctgagtcgatggttctcgatgacggtgctcgattgcggtgtctccgtctccgtggaggtgcttttctttgcatctctgatgggttcattgtagaacttcaaatgtctagtgggtatccaaacaggacgctgattttctcctggtgaaacgcaagcaaaacctctcccccacgttaccaccttccatatttcccatgtcttatttttattatctttccaccaaatcagttttccttcatgtgggctgttctttttaccagtaagatgttctgcagaagtagtagtctgatttctataaatgtttaaaaaatttaaagtatagagtgctagactaagttgcatctgaggagtggtacactccttactgtctcccccttctttttgtttaactaattgagttttgagtgttctattagttctttcaactatggcctgtccttgggaattatagggaattcctgttgtatgtgtaattttcttggaaagctttactacagtatcctggtccattgttagttttgattttttctggaactcccattacagcaaaacaagataataaatgttttttaacataagaagtactttctcctgtctggcaagttgcccatatgaaatgtgaataagtatcaactgttacatgaacatatgataatcttccgaatgaaggtacatgtgtgacatccatttgccataacacattaggacacagacctctgggattaactcctgcctcttgagtgggcaggtgtaggacttgacactgggtgcaatgtggtacagtatcttttgcctgtttccatgtgacatcaaatttgttttttaatcctgctgcatttacatgagttaaagcatgaagttcttgtgcttttatgaatgcagatgataccagtaagtcagcttgttaatttgctttagtcaaaggccctagtaaattagtgtgtgctcgaatatgagtaacataaaatgggaaatttctttttcttacagtttgttgtaataaattgaatagctggtttaactgatcatccatgctatatttgattagagctgtctcaacatcccttgtagcctgtactacatatgcagaatctgatacaatattgataggttgatcaaaatcttgtaacactgtaatgactgcaaccaactctgctctttgagtcaattgatattgagttttgattactcgctcatcagaccccagaaaaggtgttggttgatatagacagcaggacggtggccatggaagtcagaatccactaaggagtgtgtaacaactcacctgccgaatcaactagccctgaaaatggatggcactggagcatcaggcccatacccggccatcgccagcagtcaatggaatgtgagtgccttagaggtcttggggccgaaacgatctcaacctattctcaaactttaaatgggcaagaagcccagctagctcagtcggtagagcataagactcttaatctcagggttgtggattcgtgccccatgctgggtgccagatgaagaggtgagttgcccctaaaaaggataccctattccttctctttcttaatttcttttagtctcaattgggactttaatgccattttcattttttcctagtccctttcctggtatatatcccatctcagtcatgattttttgatttgcggggctgtataatggagcaggcatagtgatttccgcaccccgttgttgtaataaatctcgaccccacagattaagaggaatcgaagtagtcattggctgaacagtactttcttgattatctgaccctaaacaatgtaaaatcttagtactttgatacacttctgaggctgtgcctacgccgataagtcctataacagcctttgtttaggccaattttttggccactgattgaaagcaatgatagagacatctgctccagtgtctactaacccttcaaactgttttccttgaataatggccttacacacaggtctgttttctgagacctgacttgcccaatatgcagcctttcctgtcggatcagtgcttccaaactctcctattctttttattttactatttccaatcttaatataaggcaggagtaataactgagcaatcctgtctcctggacaggaggggggacttcctccaacacaggcagtcactgatgtcctagttcaaatgctccagggggaacagtccattactcactgagggaggcaggctttcctattttctgtttcaagcttttgatcacaatggagcaaatgatcacaatgcagcccaccaggatgctggtgatgctgaatccaaaaagtagtctggaattgatctgtgcttttctctgattcccaaggaagttggcttcctgggtctgtgggggtaaaggcaagctggtgtgaatgtttccaagatggggagggggaagaaaatccctggggagaggtgaagagggcaagatcaggatgatggcatgatggaggtcagggcagggctcagtctcccagaggaaaaaggaagaaaccagggagccaggatgagggagtagatctaggcagaatacagagggaggagcagagaggtggccctggagaggtgcaagggcaagcagatggtgaagagggaggaggcaaatccccgagaaacacgaagaggtccctggggagaagcagggcatcggcaggaaagagaaagaagatctggggacaaagagagttggtagctgggtggtgcccatcctgagggagaacaccagagcggggattgccagcaggacgcagaagaaggatacgacagcgagcagtaaatagtctctttctggaggacacaagggcatcagggtgactggttgcattggggcgagcagctgcactgggatgaagggctgcatggggatgagtggctgcatcggggtgaccagggacttcaagtccctggggctcattgcagtagccataggccttggcctgaggaggagatgctgggtgagtggaatctgcagacaggggtcatggggtccgggaaggggacatctgagtccccaagcaactgagaccacccaaaccaacccctctggctagaaaggtactgaaagttgacactgtcccaagccaggggacagcgctccaagccagaacccaccacagccccgtgctcctgtagagtagccttgctggctctggaacacccacgccaccctcctctagcctctcacaaccccctccctgctcccctctggctgttgcactttcctcctctaaactctccctacccctccttgccccgcaaactcacacacccccactgttttctcagcctcccaaagtgctggaattacaggcgtgagccactgtgcccggcctatttatttattttttgtagaggtctcactatgttgcccagtctggtcttgaactcctggcctcaagcaatcctcctgcctcggcctcccaaaatgttgggattacaggcgtgaatcactgtgcccagccactcttcctttttgttgttgttgccagtttgaacgcctgatgggttcaatatatagtgtgtggatctcacatccagattgaatataagtataatgggcagatttatcactattaggaggctactgtacattaggcccaggctggcccctgagggccacatggtaactaaggcagacaagaccataactcagatagaataatagtctccaatcccatccaggttgctgtgaatgccattaattcattccttttcatggctgagtagtattccaccatatatatatgtaaaatcagtttctttatccactcattcattgatgggcatctgggttggctccacatttttgcaattgcaaattgtgctgctataaacatgtgtgtacaagtatctttttcacataatgacttcttttcctttgagtagatacccagtagtgggattgctggatcaaatggtagttctacttttagttctttaaggaatctccacactgttttccatagttatactagtttacattcccaccagcaatcagggaaatgcaaatcaaaaccacaatgcgataccaccttattcctgcaagaatggccataatcaaaaactcaaaaaataatagatattggcatggatggagtgaacagggaacactttccttgagttttaactccagactggctcctttgctgtttttctggtggggctcttaccacatttcccacagccattggctgtgtgctcctgcatacttggatgctcctctcctgcctgggccccaccaggacccctgagatccaggagccgtggcttttgggggctggtagagaagaaacagggagctacgtgaaggccaatggcagaaaccaagagagtttcaagaaagcaagaaagagaaaccagctctgaaaatagcaaaaggaacaacgggaaaaaataaaatagtttcatgtaacctaaaaacagacattgagtcttcgaatcaaattgaaagcacttgctagcgtcagaggcatgtgaaccagagcaactccatcttgaatggggctgagtaaaatgaggctgacgtctactgggctgcattcccagacagctaaggcattctaagtcacacgatgagataggaggttggcacaaaatacagatcataaagactttgctgataaaacaggttacagtaaagaagccagctaaaacccaccaaaaacaaaaagtggcgatgagagtaacctgtggtcatccccactgctcattatacactaattagaatgcattagcatgctaagagacactcccaccagcgccatggcagcttacaaatgccatggcaaca[133 bp omitted]gcctgggcaacatggtgaaaccctgtctctactaaaaacaggaaaaattaactgggcatggtggcacgcacctgtaatcccagctactcgggaggctgaggcaggagaatctcttaaacccgggaagcagaggttgcagtgagccaagattgtgccactgcactccagcctaggcaacagagcgagactccatctcgaaaatttaaaaataaataaataaataaaggggaatatcacaagcaacgtatggcaacaaattagacagcttagatgacagctaaaaattcttagatgaattaccaaaaccaactcaagaagaaatagaaaatctgaatagatgtataacaaataaaaagagatttgtaatttaaaatactcccgcaaagaaaagctcaggcctagatggtttcattggtgaatttcacaaaacattaaagcataaataatattaattctctacaatctgttccaaaatatggagaaagggagcactttcccagcttattatatgaggtcagtattaccctaatatcaaagccagacagtggcatctcaagacaactagagaccaatctctttcataaatatgatataaaagtcattggtaaaatatcagtaagcccaatacagcaatatataaaaagggttatacaccatgatcaagtgggatttaccccagaaatgcaagattggtttaacttctgaaaatcaattaatgtaacacaccatagtaaaagaataaattttattcatttattttaaagatggggtctcactctgtcacccaggtgagattgcagctcactgcagcctcaaactcctgggctcaagcaatcctcctgccttggcctcccagagtgttgggattacagatgtgagccgttgcacctgcccctgtaaaagaagacactttttttttttttgagatgg[140 bp omitted]cggtgaaaccccgtctctactaaaaaatacaaaaaaatcagccaggcgtggtggcgggtgcctgtagtcccagctactcgggaggctgaggcaggagaatggcatgaacccaggaggtggagcttgcagtgagccgagatcatgccactgcactccagcctgggcgacagagcaagactctgtctcaaaaaaaataaataaataaaagaaaagaaagactaaattcttcctggctaagatagggaacaaaacaagaatgttcattctcaccacttttattcaacagtatagtggaggtcctagccagtacaattagtcaataaaaagaaataaaaggcatctgggttggaaaggaagaagaaaaaactgttttgacccacagttgacttaaatttgcttgtagaaaactctaatgaatccacaaataactactagaagaaatgagtccagcaatgctgcacaagatcaatatccaaaaatcaattgtatgtcaataagctaccaatgaacaatcaaaaaatgaaattaataaaatgaattcattcccaataggatcaaaaagaataataaattcaggctgggcgtggtgacttatgcctgtaatcccagcactttgttaggccgaggcgggcagatcatctgaagtcaggacttcaagacgagtttgggcaacatggtgaaaccctgtctctactaaaaaaaaatacaaaaatcagctgggcatggtggcgggtgcctgtaatcctagctacttgggaggctgaggcaggagaattgcttgaacctgggaagtgaaggttgcagtgagccacgatcgcaccactgcactccagcttgggtaacagagagaggctatctcaaaaaaaaaaaaagaagaaattcaattaaaaaaagtaataaatttaacaaaaatacaagagttgtacaataaaaactataaatcttggctggcggcgtgatggctcacgcctgtaatcctagcactttgggaggccgaggtgggcggatcatgaggtcaggagatcgagaccatcctggctaacacggtgaaaccccgtctctactaaaaatacaaaaaaattagccgggcgtagtggcaggcgcctgtagtcccagctactcgggaggctgaggcaggagaatggcatgaacctgggaggcggagcttgcagtgagccgagatcacgccgctgcactccagcctgggcaatagagtgagactctgcctcaaaaaaacaaacaaacaagcaaacaaacaaactataaatcattcctttaaaaatttaaagatctaaataaatggagtggcatcccatgttcatggtttggaaaactcaatgttagcaaaatggcagtactcccctaattgacctaaagagtcaatgcaatctttatcgaaacctcaactggcttgtttttttttttttgcagaatttgacaagttgatcctaaaagtcatgtggaaatgaaaaggatgcagaataacctagcaatgttgaaaaagtaaaataaagttggaggacttccagttaccaatttcaaaatttattcctgattacaaagctataggaataaagacagtgtggtactggcataaggatggacgtatagctcaatgaagcaaaattgaaagtccagaaataactttcatatttatggtcaagtgatttttgacaaaagtggcaaaaccattcaatgtgaaaaggagatccaacaaatggtgctagaacaattggatctctctctctctctctttttttttttttttctttttggagatggagcctcgctctgtcacccaggctggagtgcagtggcatgatctcagctcactgcaacctctgcctcccgggctcaagcaattctcctgcctcagcatcccaagtagcttggggctacaggtaaccaccaccaagcccagctaatttttgtatttttagtagagacaggtttcaccatgttggccaggccaatcttgaactcctggccattattttcaaatgattctcacatgctctgaaccccactcattcatcattattatctctttttttttcttgagacaaggtctccctcttgtccaggctggagtagaggggtgcgaccatggctcaccacagcctcaaattcctgagcaaaagcaaacctcccatcacaccctcccaagcagctgagaatacagaagcctgccctcagagcctgatatatatatatatctgtctaaaatatatacattttttttctagatacatggtcccactgtattgatcgggctaggtttcactatcctggtctcatgtgatcctctccccttagccattatcaccttatagagtgcacattttgttccatgcactgttcaataccacttacatacattaatttaatcctcacaatgaaacaagagagaaataattattattctcattttaaagatgagaaaactggtacacagagaggttgcacaaggtgatattgctagttagtggcatggtggggatccaaacctaggtagtctagttccaaggtgtgtttattcagcccatgtttactgagcacctactactatgtgttgggctctgctctaggtgttagagctatagacagtataaaagaactacctcgcccccattaagacatctctcctggctgggcatggtggctcattcctgtaatcctagcactttgggaggccaaggtgggtggatcacttgaggtcaggagttcaacaccagcctggccaacgtggtgaaaccccatatctactaaaaatacaaaaataagccaagcatggtggtgggcacctgtaatcccagctactcgggaggctcaggcaggaaaatcacttagaacccaggaggtggaggtttcagtgagccaaggttgcaccattgcactccgccctgggcaacaagagcaaaactccatctcaagaaaaaaaaaaaaaaaagacatctctcccatatctctctcttattgagacatggtctctctcacctttcccaccaaaaattttttttaaaaaaacaaaaccctttcatcactcagccccctcaagttatggatctggtttttggtttttaattccagagacaaaaaagggggcagaacatagacccatgctaccatcttgacagagtctccatttcagttccatacgctcaagtccctcctatctttaaaacaaacaagcaaaatcatcattctcacccttttgcatctaccctagtcctgcctttcctggctcttcataggcaaacttttttttttttgaaacggagtctcactctgtcacccaggctggagtgcagtgacacaatcttggttcactgcaaactccacctcccgggttcaagcaattttctgcctcagcttcccaagtagctgggattacaggcacccaccaccacatctggctaaattttgtatttttagtagagacagggtttcaccatcttggccaggcttgtcttgaactcctgacctcgtgatccacccaccttggcctcccaaagtgctgggattacaggcatgagccactgcacccagccataggcaaaattcttgaagcaaatgtatacactgtctccaattccacacctcacactcaatccatggctctctgaaaccaggtgttggcttacaacattccagaaactggaacccatgttcttctcagctgtggcactgctctccttactctttcgcctccaagctcttggaagaaatgtctacattgtctatactacccctttcttgctcactgcctggatccctgcaatatggccactgcttctgctgatcctctgatactgcccttaccaaaggagctaattcattcccgccttcagagctggagtacatgtctcagggcttgacacacttgtccatgtacttgtttctaagcctgtcttagtttgtttgttccactatccaagggacttgccagcaaccaatacacatgcttcatctcacccaaccttcacttctgtcttcccccacctcggcgccccatgttctgttgtcctggaacatccacttggtcctttgaaaggctctgaatcaatttcctccatgaagaatatcctgacttctggattgcatgtgttgtcactgttcttctaactacttctaggtccaggactggtcttaaatacccaggttgtgtcttggactagccatactaaggtctacatttgtggactgcacagtgtcacctcccacccacccccaacttcctgaaaagtggctcctcaaaccctctactcccctagaaccaccagctaaaggaagcatcagctaaaaccccacagtattagcattcattaaaagctcctacctgaatcagcaattactatggtatttgaaaatgttctctaatggtgcataacaaattccccacaggtattaactcacagttctgtaggtcagaatggctgcttctctgctcagaatctaccaaagctaaaattaaggtgtcagctgggctgggttctcatgtggagctcaggatcctcttccaaatgaatgtgattacagcaggattcacatccttgctgttgcagtactaaggaccccgtttccttgctggctgtcagctgggagccattctcagccagaggctgcctggattcctccctacgtggccctggtgacatcttcatgccagcaatggagacctttgcttgcctccaatcctctcacacctgaaacctcttttgccaggaagactcagtccttttcaagaactcacctcattaggtgaggcccccagaggatattcttcctaacttaaagttaactgatttcagaccctacctacgtctgcaagacgccttcccagcagcatacagactagtacttgactgagtgactggagaaggagtgtgtacaccagggagcaggaatcttcgggtcatctcagagttctgcctaccacattggggatttcctgttccatcgttccattaggttgtgttctactttaagaaagatcttcccccttttccccttctttctctattctttccttttttctttctgtcagcataaaccaaggaattcttttttttttttttttttgtcattttttcttgagatggagtctcactctgtcacccaggctggagtgtgcagtgtgatctcgaatcactgcaacctccgcctcccgggttcaaacgattctcctgcctcatcctccctagtagctgggattacgggcgcctgccaccacacccggttaatttttgtatttttagtagagacggggtttcaccacgttggtcaggctagtctcgaactcctgatcgcaggtaatccgcccgctttggcctcccaaagtgttgggattacaggcatgagccactgcgcccagccggaattcatttttaattcaagactttacaatccacttctgacactactcattttcctcccctcagtaaatctcttactcttactgggcgtgtctagtttctctcttccacaactcctgggagaccctcctgacatcgcccatccgcgcaggctgcagagagagatcagtgggaggaggaggagccgagagccaccacttaggcttccaaccaatccctaccagggtgggcggagcccacttcctgattggctgcactctctgtgtcttggggtgggcgagaacggcggggccacgccccctaactaggcagccaatcaggacgtggggtgctggtttctccattgcgaagcttcagcctttgatggtttgggtcctgggagtctggttagtacaaggggaagcctagtgggtctggcgctccgttttcaagacactcggagtccgtctttgaggggaaaggtcatggccctgaaaccaccttctgccacccagcctgctcccaacgcgccagctaccccagacgccccccctaccacaggtgatccaggtgcttcagctgccccaggttctcccactaccacaggtggtccaggtgccccagctgaggtgccccaggagccgcaagagcctacacagacaccagaggaactagcattttacgccccaaactacctatgtttgaccatctttgctatacttttattccctccatttggattggcagctttgtacttctcttatgaggtaaaataatgcccaagtcatagcccccgtccttttttttttttttttttctttttgagacccagtctcactctgtcccccaggctggagtgcagtggtgcaatctcggctcactgcaatctctgccttcccggttccagcaattctcctgcctcagcctcctgagtagctgggattacagacatgagccacagtgcccggctcatttttgtatttttagtagagacggggtttcaccatgctggccaggctggtctcgagcttctgaccttgtgatccacccgccttggcctcccaaagtgctggcattacaggcgtgagccactgcacccagcctaccctgtcctccatttggcccctgcatctgctcctatcctgggacctgcataggggctttccctcagtgactgcaggtctccaaccgttctccccagggttcctggacacagaaacccacatctatgcttccacccctacagactatgaaggccaaccagaacagtgaatgggaagaggcttacatcaactcaggccgaactggttggttcggtgcattcgtggtaatgattggcttaggcatcatttatggcttggtcctatattaatgaagtctaggcatagcaacccaggggtccgctccccaaccgagccactcaccaaacactaaccagccaagtcagccatcaggcaagaaattcaaccgctgagacatctagccaagaaatcctctaaccaaggaactcaacattcaagaaacccaccaacccaggaacacacagaccacctgcctgtgctacttcaactcactcagctccagagctgtcttcgttcaccctaggggtccacacttcatgccctagatccctttagctccttgacactgggctgttctttcagaggaattttaaaccaaaaaactggaatggaatgttctggtttcctgtggtgtgtgtgtatgtgtgtgtgtcaacatgcccatgattgttttctgggtcagtggtcagtatctgtgtttccctggagctgtttcctagactgtgaaaatcagaatgtcccaatggggaagcccacagacatagaattcaggcagatgtcagttaaaaacttacctctgacactgaaaaactgtatagccctgaacagatacttttcttgagcatagttcctttgtctctaaagcaggcataattgccaatgtggggatgatatttagaaatctgaactgatgtttattctctaggggtcttctcatttgagctgggattggagatgtctagtgtctcagagcagcaataagaaaacagaaacctcttccagcttctgacatccaaatgtcaagctcttaggagaagaatggaaagtcctcaagaaatgcaaatagctttggcagaatagctgatgaagaccacctctcccccctccagaaaggcattggttccccattcatggaaaagggaatgtagagagagattagacaatagtacatccataaggttcctggaatctgcatctgaggaagaggggcgtcagagaccccagctgttatctataatccctcctcacagataaggcctagagaggctccaagttctcaaagaagatatgctacatggtgtagacatttacaaagaaatgacctcagacagccaaggaggataccccatggcccagcctagtgagaagaaggtgggttccataggaatcccaagtgccaggtggagacagaactgtagaggaaaactagggataagcagggagccatcgtgcatgaatcaaaacagagatctagactgacaccatgggccacagacaccccggggctgcctctgatgcccaagcttcatggacaaccccaagttcagaaccagatgaatatttagcacaatatttagcagaactaagtttccaccaccatggagaatggggattctcagtagaaagtcaatggagctgctgggcaagagactgctcactgtcccccagagcccatcgcctctttgttctgggaacattgcctggccacgtctcagaggttcccctctgcagccatgaaatgtgctttggtcctgtggaatgtgagcagaactgacatgtaccacaaacaaacctggcttttcaatgtctcctgggacactcctctaaactcctcctcccccggccaacggggcaagggatacccatgtgatgatttagaaggccacatgttgtagacgtggcaaagcccccattagcctgggtccctgaaccattctaggaacagcctcccttcccccaactgcctcatgtggtcaagcagaaaatagactaccatgttgacaaatgacatgcttggcctgtttccacagcccaatccacccaaaccagtgcagatgcaggagaatagagttctatttcttgcacatctgggattacagcttcaagttcatacccaacagagacatccatcttgttgggtggtctataggaaataataatagaaggaaacaacaaaggccctagtccaccttaattgtaattgttgtgatgctgagtttgtctcctctgtgggcttgggtgtctgggcagatctcatgtgtttgtgggacaatgctctgggttatggggatgcctgcagataggatgatgcctaattgtctgtcatgttagcagatctagagggttagccatccctgtccctctccagatccagcccaggctgggcctgtcacattcagctgcaaagccatgtcaggttaggatggtccatgtcaacatcagcaggcagacccaagtgtcaccttctgctacaggccttggaaagccagccagcctcctccacttcagctcccagacttcatccaacctgaatttcactctcgggtatccaactggtatttagcaccaggtaaacacaaaacgaggccaggcacagtggctcgtgcctgtaatttcaatgctttgggaggctgagagaggaggatggcttgagcccaggactttgagaccagcctaggcagcaagtcgatagataactcttttctacaaaatttttcaaaattagccaggcgtggtggcacacgcctgtagtctcagttactcaggagggtgaggtgagaggatcactttagcccaggattttgaggctgcagtaagtcatagtgatactactgcacttcagcctgggggacacagctagactttgtctccaaaataaataaatgtaaaaaataaggccgggtgcagtggctcacacctgtaatcctagcactttgggagactgaggtgggaggatcacctgaggccaggagttcgagaccagcctggccaacatagtgaaaccctgtctctataaaaatacaaaaattagccactgtggtggtgcgtgcctgtaatcccagctactcgggaggctgaggcaggataatctcttgaacccgggggtggaggttgcagtgagcagagattgcaccacttcactccagcctgggcgaaggagtgagactcaacctcaaaaaaaaaaaaatcttatctgactttgattgcattacaatcaatttagttatcagttttgggagatttagcatctttatgataagccttcctattcataaatatgatatatcaaataggacttgtacatctttagctttattttatgtattataagcaatccttttttccattacataatctaaattattattggggtagaagaaaggtattgagtttccaatgttgatatcttgtgtggcaaacttactgaactttcttggtgtaataattcatcattttacacacttacattgtctatgctaaatttgaattatttcttaacaattttaatacctcattatatatgtatttttttagttcctgggctaaacctttcagcaaaatatgaattagcatcataatcttgtttccatccttgtatgggttagttctattgttttactattaagtcaggcagttgatgtagatttctgataaaaatttcatcttttttttttttttttctgaagcaaactctggctctgtcacccaggttggagtgcagcggcacaatctcagctcactgcaatctccgcctcccaggttcaagcgattctagtgcctcagcctctatagtagctgggaccacaggcacgcaccaccactcggggctaattttttgtatttttagtagagatgggatttctctatgttggccaggctggtcttgaacccctggccttaaattatctgcctgcctcagcctctcaaagtggtgaaattacatgcatgagccaccgtgaccagccaaaatttcatcaattttgttatgttttcttctattcctggcttgccaagattttttaaattagaattttatattgaggctaggcacagtggctcatgcctgtaattccagtactttgggaggccaaggaaggagagtcatttgaggccaggaatttgagaccagcctgggcaacatagctagatctcgtctctactgaaaaaagaaaaaaaaattagctaggcatggtacctgtattctcagctactcaggaggctgagatgggaggataacttgaacccaggagttagaggcagcagtgagccatgatcacacccttgtactccagcctgggcaacacagcgagaccctgtctcaaaaaaaatttgtgttgaatcatattaaatacttttcagcatctattaacatgatcatacgagattttaattcaatcctttaacaaagttattcacaatgaaccattcttatactcttgggaaaaccttactgggtcacaatctattattctttttttttttttttagagacagagtcttgctctgtcgcccagactggagtgcagtggcacgatcttggctcactgtaagctccgcctcccaggttcacgccattctcctgcctcagcctcccgagtagctgggactacaggcgcccaccaccacacccggctaattttttgtatttttagcagagacggggtttcatcgtgttagccagatggtcttgatctcctgacctcgtgatccgcccgcctcagcctcccaaagtgctgggattataggcgtgagccaccatgcccggcctctattattcttttaatatgtgatggatatggtttgcttatgccttatttgggtcctacatagttttcatctgggggctgttctcagtcctttgcattggggcagtgctggcaatgcagaatgggttgagaagcattcaatgtgtttctgtgttctggaaacatttctatgtcatgggaattagctgcttcttaaagattggagtgggccggacatggtgcctcatgcctgtaatcctagtactttgggaggctgaggcgggtggatcacctgaggtcaggagttcgagaccagcctggccaatatggtgaaacccccatctctactaataatacaaaaattagctgggcatggtggcacacaactgtaatcccagctgctcgggaggctgaggcaggagaatcacttgaacccgggaagcggaggttgcagtaagccaagatcacgccattgcactgcagcctgggtgacaagagcgaaactccatctccaaaaaaaaaaaaaaaagttggagtgaacatgcctgcaaaatcttctgggcctgtaatctttttcgtgtagcagattttgagtactttgtcttcactatgatggtgaaagcagcaactctcggagtcaagtacaagccactgttatgagcagcttcggagtattgattcttttggtctccacactaaccctatagcctgcattcttacagactgaggataaagcacagggagctggaaagacacagtgcaggtctcacagcgaattcactgaggggccaggattgggaaccaggaaatctgccaccaaaagccgtgttcttaagcactaggtggacaacactgcctcccatcgaccgttagtagcaattcaatctttttacctgctggagtcacttgttaatcacttacctttctcttaacaaatcatttttattttcgacatagaagctaacttgaaggagcgcccactggcccagagtggtacaacttaaacatcaaaaatattaataacggccaggcgcggtggctcactcctgtaatcccaggactttgggaggctgaggcaggtaaatcaattgaggtcaggagttcgagaccagcccggccaacatggtgaaacctcgtctctactaaaaatataaaaattagccagccgtggtgacagtcacctgtaatcccagctactcgggaggctgatgcaggagaatcgcttagagctcgggagtcggaggttgtagtgagccgagatggcgccattgcactccagcctgggcaacaagagcaaaactccgtctcaaataataataataataataatagtaataacaataatagatttaaacacaccaaatatatatcatatttaatgatgaaggatggaatactttccctataagatcaacaacaaggaaaggatgtctgctcttgacactcctatttgacatagtgctggaagttctagtcactgcaagaaaaaaacgcaaacagggcccggcgcagtggctgacgtctgtaatcctaacactttgggaggcaggaggatcacttgagactaggatgtcaagaccagcctaggcaacacagcatgaccccatctctacaaaaaatattaaaaaattagccaagcatggtggcacatgcctgtagtcctacctgctcagggggctgaggcagggagatcacttgagcccaggactttgagactgcagtgagctatgatcacaccaacactgcactccagcctgaggaatagagtgagactctgtctcaaaaaagaaaaaaaggcatttagattggaaaggaagaaataaaactgtatctgcaggtgacatgagatatgtgtgtgtgtgtgtgtctgtgtgtgtagttga[136 bp omitted]agctggagtgcagtggtgtggtctcggctcactgccagctccgcctcccgggttcacgccattctcctgtctcagcctcccgagtagccgggactacaggcacccgccaccacgcccagctaaatttttgtatttttagtagagacggggtttcaccttgttagccaggatgggctcgatctcctgacctcgggatctgccctcctcaacctcccaaagtgctgggattacaggcatgagccaccgtgcctggcgtttttcttttcgttttttttttttcttttttttttttttttggagatagagtctcactctgtcacccaggctggagtgcagtggtgtgatcttggctcactgcaacttccacctcctgggttcaagcgattctcctgcctcagtctccctagtagctgggattacaggcgcccaccaccatgcccagctaatttttgtatttttagtagagacggggtctcaccatgttggccaggctggtcttgaactcctgaccttaggtgatccacctacctcagcctctcaaagtgctgggattacaggcgtgagccacagccctggacggatgtattttcaatacatgtctttataatgcatgtgaaagctaacgcatacatgggagacaatgaagggaccaatatggtggaagttttccatattccacttgaagttgcaaaatattcaatctaggtagactatagaatgtttaagtgtgtttaccataatccgtagagcaatcacttaaaacttgcaaagatatatagtgaaaatcacaataaataaattaaaatggagtactaaaatagtatttgaataatccaaaagaaagaaggaaaagggaaaacaaggaacaaaacacagaaaagtggaaataaaaaacaaataatagtagacctaaagcaaaacataccaataatcatatttaaggcacatgatctaaacacacaagttataaaatattttcataatgcacttaaaaaaaaaatagccagagccgggcgcgttggctcacacctgtaatcccagcactttgggaggccaaggcaggcagatcacgaggtcaggagaccatcgtggccaacaaggtgaaaccctgtctctactaaaaatacaaaaattagctgggcgtggtggcggatgcctgcaatcccagctactagggaggctgaggcaggagaatcgcttgaaccagggagtcagaggttgcagtgagccgagatcgcaccactgcactccagcctggcgacagagggagactccatctcaaaaaaaaaaaatagccaggttcaaaggctcatgcctgtaatatcagcacttcgggaagccgaggtgggtggatcacttgagcccaggagtttgagatcagcctggaaaacatggtgaaactccgtctctactaaaaatacaaagaagttagctgggtgtggtggcacacgcctatagtcccagctacttgggagactgaggcaggaggataacctgagcccaggaagtcgaggctgcagtgagccatcatcacatcactgcactccagcctgggtgacagagtgaggccctgtctcaaataaatacatacataaataacttgagcccaggagttcaagatcagcctgggcaacatagtgagaccccatctctgcaaaaaatttcaaaattaacctggcatggtggcttgcacctgtagccccagctactcagaagtttggggcaggaggttgtttgagcccaggaggtcaaggctgcagtgagccgtgttcacaccactacactccagactagcaacagaacaaaaccttgtcttaaaaaaaatagaagtaggccaggcgcggtggctcactcctgcaatcccagcattttgggaggccaagatgggctgatcacctgaggtcaggagttcgagaccagcctcactaacatggtgaaacccagtctctactaagcatacaaaaattagccaggcatagtggcaggtgcctgtaatcccagctacttgggaggctgaggcaggagaatcacttgaatgcaggaggcggaggttgcagtgagccgagatcacgccattgcactccagcctgaacaacagagtgagactctgtctcaaaaaataaaaaaattaaaaacttaaaaaatagaagtaggccgggcgtaatgcctgtaatcctagaactttaggaggccaaggcaggcggatcacttaaggtcaggcgttcgagaccagcctagtcaacatggcagaaccccgtctctactaaaaatacaaaaaattagccaggcatggtggtgcgcacctgtagtcccagctactcaggtggctgaggcaggagaatcacttgaacccaggaggcggaggttgcagtgagccaagatcacatcaccacactccagcctggaagacagagcaagaagaaagaaggaaaagaaagaagagaaggaaaaggaagaaaagagggaagggaagggaaagggaaagggaaaggggaaggggaagggaaggggaaagggaaagggaggggaggggaagggaagggggaaagaatgaaggaaagaaaggaaaggaaaggaaggaagaaaagaaatgattgtttgcttggtgttggaggggcttgagggggtggggaaaaaggggggaacccacacatttgatcaaagaactcttctgtgttgactgttgtggtatgagagcagagaaaatgcattgtgtttttcctgaaacacaagactccgaggcctacatcactcttgccccaagtagtgcttttctctcaagatgctcaggaggaatctttaaacaaagatgatcaaggaaatgaggcttatttataggtctgttttgaaggtggaaccagggattcctcaattggccaatcacttgagagagtagaaggagctgtcaccccatcaaaccaatcagaagccaggtgttggttcccaccctatgacataccacctccaattggccagtagaagtagagagacaggctaggaggcggggcctgcctggccgccatggtaatcccctgtggttggtgatcaaggaagagcatagtgccagacctaggtgccctcctgggaatgttccaggagggcaggagtaggaggaggagtgttagagtagaggggaaatgatgagagcagaaagggtatcataaaggaacctcaggggtgatataagtggacacagacatatgtcacaagggcacgggtttagaacaggaaggctgttgtacgtggttggagagggagttcaaagagtcagaaagctggtttcagaagttgagaggtgttagagggagacagggcaggactttgtaaggtgacaaagaagtagagactgaaaccctgtctctactacaaatacaaaaattagccgggcgtggtggcgggcgcctatagtcccagcaagaggagtgaataggtggtcaaataaggtcttagaggagctaaaggggcagggagcttatgggcgaacaggaaaggtttacagcaggaccccgcaggattcatagggacgaagtaaaggatattataaaaggaacagtgagagagctaacagaagttttactttggggggcagaggtgggaggatcacctgagcccaggaattcaagaccagcatgggcaacattgtagcaaaaccccatctctaccaaaagaaaaaaattttttttttttttttttttttttgagagagtctcgctgtgtcacccaggctggagtgcagtggcaggatcttggctcacttcaacctccacctcccgagttctgcctcagcctcccaagtagctgggattacaggtgcgtgccaccacgcccggctaatttttgtatttttagtagagacggggtttcactatgttagccaaggtggcctcaaactcctgacctcaggtgatccgcccacctcggcctcccaaagtattgggattacaggcgtcagccaccacacccagcaaaacaaaaacaaaacaaaacaaaattttagttagctgggcctggtggtgtgcacctgtagtcccagccactcaggaagctgaggcaggaggatcacttgagcccaggagtttgaggctgcactgagctatgattgtgcctttgcactcctacagcctgggagagaagaccctgtctctgaaaaaaaaaaaaaaaaaaaaaaaaaaacagaagacaaagaagttttacagggtgagagttttataagggaacagtgaatttataatgaaggttttatacccaaacacaggtccagtcactccacgcttgcagagtccaattaacaagagcaagttctggtagaaagaaggtgactttattccagagctcaggtgaggggaagaggtacaggttcctgccttaagggtattgcttcagctttcaggacagaaagcagggacttttaaaggggggcttgatgtgaatgacataaaggtggggggcaaggaggtgtggggtctatgtgacatgctttgatgtcttatctatcaggtgttctagctgtcaccatcgtgagaagagaaattgaccattgtctcaaggcaatctgatgggagagaattctgggggtgcctgatttgtttcaaggttcagtccctggaacttctaagtaaacatattgttagataagcttgccatgtagggaggttacagttgcattcctaaagagttaagtaggagatggggggaaaagaaaaaggaaaaaaatccttttttttctttaaaaatggggtactctggccaggcacagtggctcaaacctgtaatcccagcactttgggaagctgaggcaggcagatcacaaggtcggaagttcaagaccagcctggccaacacagtgaaaccccgtctctactaaaaatacaaaaattagccgggcgtggtggcaggtgcctgtagtcccagctacttgggaggctgaggcaggagaatcgcttcaacccacaaggcggaggttgcagctgagctcacgccactgcactccagcctgggcgacacagcaagactttgtctcaaaaaaaaaaaatgtggtactcaattacagtttcccactgtcaaattccattccatttctatgggatttggatgccacattcatgctggctacttcctgctgaaagagggcattgtgattagtcatcagaatggaaccgatccacttggagttggaaatatttatgagtagttggaccaatatggtgtaaggtctggaaagtctctggggaagtctgtcttgcattcccatatagaaggtgaaacagcagaaaaatccacagcagagaagtatgtctatcattgcaactagggccaaagttgtaaatagcttctttccaggtgagaacagtcctcacctgcaacaggatgccaaccattgacctggtgataatgtggggtcagacatagctttgatttttaggtgcatgtctctcagggctattgagacatttactgaattatctgagatgtgtacacagcatttagtcttaattgtcaggcacattcccagctgtcaattgtacctggagctcctgtggagatatgatgacagggtg[137 bp omitted]ctaccagaccgatgaactcagtctctactaaaaatacaaaaattagcgggcatagtggtgcacacctgtaatcccggctcctcaagtggctgaggcataagaattgcctgagcccaggaggcagaggctgcagtgaggcgagatcgtgccactgccctccagcctgggtgacatagtgagactttgtctcaaaaataaaaaataagtaaataagaaagggctgggtgtggtggctcatgcctgtaatcccagcactttgggaggccaaggcaggtgggtcacctgaggtcaggagttcaagaccagcctggccaacatggtgaaaccccaactctactaaaaatacaaaaattagctgggcatggtagcacatgcctgtaatcccaactactcaggaggctgaggcacgagaactgcttgaacccaggaggcagaggttgcagtgagctgagatcacaccattgtactccagcctggagaaaagactgagactctgtctcagtaaataaataagagcgatacagaggccaggcatggtggttcacacctataatcctagcactttgaaagatcaaggcagaaggatcatttaaggccaggagttcacgacaagcctgggcaacataatgagattccatctctacaacaacaacaaaaatcaaaaattagctgggtgtggtggtttgtaccagctacgtgggaggctgaggcaggaggattgcttgagcccaggagttcgaggctgcagtgaactgtgatcatgccagtgcacttcagcc[146 bp omitted]aaccccgtctctactaaaaatacaaaaaattagccaggcgtggtagcgggcgcctgtagtcccagctactcgggaggctgaggcaggagaatggcatgaacctgggaggcagagcttgcagtgagccaagatcgcaccactgcactctagcctggatgacagagcgagattccgtctcaaaaaaataaataaataaaataaaaaataaaaaaaagggatagagagaggttagaggagacatggtgggggttagagaaagtcaatgagaattttaaatggggtcaatgaagatcatatagctgccaaggagagatgtgttagggtaagtagggagagagtgagaaaggattgttagagttcagaagccatagtgagacataaccaactctctgccccccaggtgtttgaactgatgtctgatgaggatgaatccagcgactacctctgcctgtccatcctgggcctcttctgttgccttcccctagccatcccagccgtgatcttttcttgcctggtgggcacctgcatcatgccaatccttcaccctccctctccatcttgcccctgaccctgactcaacttcttccttgttctcccttctgaactaggagcctgagcaacaccagcacctcctgtgggttcagacccccaccctgagtccttacagttccacagcccaccctcacccaacaactgttttttttttttttgaaacagagtctcgctctgtcacccaagctggagtgcagtggtgagatctcagctcaccgcaacctccatctcgcaggttcaaacaattatcctgcctcagcttcctgagtagctgggattagaggcgcccaccaacacgcctggctaattttcgtatttttggtggagctgggtttcaccatgttggccaggctggtcttgaacacctgacctcaggtgatctgcccacctcagcttcccaaagtgctgggattacaggcatgagccaccatgcccggccacgcaataactcttttatactcatctttccctgttccctctctcctaaaactcagacaaagtttgtattgtagacaaagaactacaataaatccagtgactatgagctggcagccaagacctccaaacaagcctactactgggccatcgcgagcatcactgtgggaatcttaggtaccatcttgtacacctacctgatatacttacttagattgtaaactgcttcccagctcttgaacaaaccaccaaatatacaccacagtgcaatttaccttggctctaagcatctacttgggctgaatggaacacctgctcctcaatgtctggagtgccaagctatctaagattagaaaaacaaaatgcaaagtgttcttcctattcttacatgcccctcaaagtaacacttctttttttttttttttttttgacagagtcttcctctgtccaggctggagtgcagtgccacgatgtcggctcactgcaacctctgcccccaaggtttaagtgattcttctgcctcagcctcctgagtagctgggattacaggtgcgtaccaccatgcccagctaattttgtatttttagtagagacggggtttcaccgtgttggccaggctggtctcaaactcctgacctcaggtgatccactcaccttagcttcccaaagtgctgggattacaggtgtgagccaccataccaggcctcagcataacacttctaacaccaaatgttagagccaggggcaggggtattttccccacctaccaaccaaccagattctccagcagacaccaactgggtgtcctgtaatttaattcaattctgacactatctacctggagatggcatcagatcccacaggttgaaggctcagttccacaagactgcccccaaatttggatgtcagccacaagtggtaagttgtcacctagacttgtgactgacaagctataaatcaggtgttcccatgacccccctcctcaagcctgattaatttgttccagctggccaggtgcagtagctcaggcctgtaatcccagcactttgggcggctgaggcaggaagatcgcttgaagccaggagtttgagaccagcctggccaacatggcaaaaccccgtctctactaaaaatacaaaaattagacaggtgtgatggcatacgcctataatcccagctactcaggaggctgaggcaggagaatcgcttgaacccaggaggtggaggttgcagagagctgagatcatgccactgcactccagcctgggcaacacagcgagactccgtcaaaaaaaaaaaaaacaaaacactattatcactccagcgattccaagggttttaggagctctgggccacaaaatgggacctagaccaaatatatatgtcacagtatcacacaagtgttgccagcctgggtcagcagcttgaagggaaggaagtggtagtgccagcagcccactcgaccagaactcaagaccaactccaggaccctgctatggcgtgggggacatgggagagagaggaggaccccgttgctcgaggacagcctgcccagattcatgtattcacatcgcaagtctagttctgcctaccaagggcgttggctgtgctacctgactctggagacgtagcaatgactacttcaaattcaactcaaccccctcagaacatataaattggggtgagagacagacatgccaccagacagtgacaatcggagtggtccaatatataatggaagaaaacttgggaagggttactaaagaaacacttgtttaatgacactcgttacagacagtaaggcgggccaggcacagtggctcatgcctgtaatctcagcactttgggaggccgaggcgggcggatcacttgagcttgggagttcaagaccagcctggccaacatggtgaaaccttgtctctactaaaaatacaaaattagccaggcgtggtggtgtgcacctgtaatcccagctactcaggaggctgaggcatgagaattgcttgaacctgggaggcagaggttgcagtggttcgagattgtgccactgcactccaacctgtgggacagagcaaaactgactccatctcaaaaagaaaaagacagtaaggcagactttattcaggaccattgcaatatgcagagggaatactgagacaggggcctgcactggaggagaaagatggggctcaacactaaatacagcatgagcaagtgggaagtcctacccaaggagcagggtaggggtcagtggatggaaaattagtaagagaaaacattgagggtaagggggattctgactaaaccaacctaataggattctagttgaagacaggccagggtgaccagacatcaccagggggatggtggaggatgaggaacctgatcagatgccgaggtgtatcagatacagaggatgagggtttctagctaaactgacgtagaagggttcttttgctacaactggattttacaaagaagtgcacagaaggagaaggttcagatgcttttttttttttttttgagatggagtctcactctgtcacccaggctggaatgcagtggtgcaatcttggctcactacagcttccgcctcccgtattcaagccattttcctgcctcagcctcctgagtagctaggattacaggtgctcaccacctcaaccagctaattttttatagttttaatagagatggggtttcaccatgttggtgaggctggtcttgaactcctgacttcgtgatatgcccgcctcggcctctcaaagtgctggaattataggcgtgagccaccgtgcccagcctttcttttttttttttttttttttttcttttcttttcttttttttttttttttgagacggggtctcgctctctcactcaggctggagtacagtggcatgatctcggctcactgcaacctctgcctcccaggttcaagtgattctcctgcctccacctcctgagtagctgggattacatgcgcctgccgccacgcctggctaatttttttatttttagtagagatgggatttcatcatgttggccaggctggtcttaaaactcctgaccccaggtgatccacctgccttggcctcccaaagtgtaggaattacaggcgtgagccaccgcgcctggccgcccggctaatttttatatttttagtagagctggggttctccatgttggccaggctggtctcaaactcctgagatcaggtgatccacctgcctcagcctcccaaagtcctgggattacaggcatgagccactgggcccggcccaggttcagaagcctgactaaagtttggccaagcaaagaatccttgtcaggaggctgtaaataagagacctgtgagaaataaaaattgtcaggtgtctgagcccaagcctgcatgtatacatccagatggcctgaggcaactgaagaaccacaaaaacaagtgaaaatggccagctcctgccttaactgatgacattaccttgtgacattccttctcctggacaataagtctccggagctccccaccgagcaccttgtgacccccgcccctgcctgcaagagaacaaccccctttaactgtaattttccactacctacccaaatcctataaaactgcctcactcctatctccctttgctgactcctttttcggactcagtccgcctgcacccaggtgattaaaaagcttttactgctcacacaaagcctgtttgatggtctcttcacacggacgcacgtgacaaaaataaaatcctaagtccgccaactggctgaatgaacactgtcttggccaaggggcctacagagaaacactaaaagctgagttcctagccgtgactgaacgggtggtcgggcacacctcattctacctcctcccttgctgactgccatgaagctttcttccctaagggttaaacagaaaccagccctattgaaagactcattcactgctaatttcaaccaatggcctgaaatacatggctgctcctcccttttgtggtttcaacataacaactgaccagcattccttcctgatcagaggccacctaaccacggggtgtggctctggccagtctacagaggctgcacacaaagggcctttgtgtcctctgcatcaccttttgatgtatagggcctaattgta[138 bp omitted]catggtgaaaccctgtctctactaaaaataaaaaaattagccaggcatggtgatgggtgcctgtaatcccagctactcatgaggctgaggcaggagaattgcttgaaccctgggaaagagaggttgcagtgagctgagatcgcaccactacactacagcctgggtgacagagtaagactccatctcaaaaaaaaaaaaaaaaaaaaaaaaaagtgaatatgggatgttactacacatgtgctgtaccttcccttcatgaatattcatagctcctcctataacctgttgaatatgtatactgagccaagccattcagcgttaactctgaccttatccttcccttactggaggtgcctgctctcagcttctaccggaggctacacttctcggcctgtgagatggcccggctgcaggctgcaactctttatgagaaataaagctctcctttccaaatttgtaaacctgtattagtctgttctcacgctgctgaaaagaactgcccaagactgggtaatttataaaggaaagaggtttaattgactcacagttccgcagggttggggaggcctcagggaacttaaaatcatggtggaaaagaaagcaaaaacgtccttcctcagatggcagcaggaaggagaagtgccaagcaaagagggaaaagccccttataaaaccatcagatctcgtgagaactcactatctcaagaacagcagcatgggggtaaccacccccatgattcgattacctcccactaggtccctcccacaacacatggggatttggggaactacaattcaagatgagatttgggtggggacagccaaaccatatcaaaacctcatgattcttcagttgacatctaatctgagctaccatggtctatcaaaaaaccacagctcttgaggggatctcaatggctgttaacaaactggttagagttctggtcaggttctgattgtagagagcctctgtaacagatatggattgcctccttccccccaccctccttgttatttttatttcattttattaaatttttttttgagacagggtcacactatgtcacccagactggaatgcagtggcacaatctcagctcactgcaacttctggctcccaggttcaagtgattctcatgcctcagcctcctgagtagctaggactacaggtgcatgccaccatgcccagcaaatttttatattttttgtagagacagggttttgccatgctgcccagactggtctcaaactcctgagctcaaccaatctgtctgccttggcctcccaaagtgctgggattataggcgtgagccactgttcccagccatgatttttatttaacaaatactcattatttaacaaatactttctgagcacctactgtgtcccaggcattgtcttgggaacgaggaacacaacggagcaagagaagtaaggccaacttcttctctgatggagcttacattctagtgggaaagaaaactataaacaagtatacccaaaaataaacaagataattacagggaatggtaaatgctatagagaaaaataaaacagaataagaagctaaagtggtgccaggactggtccagcaactattatggtgttgggagcaagccccccaaaatatggccataaactgaccccaagactggccacaaacaaaatctccacagcactgtgacatgttcataatggccctaacgcccaagctggaaggttgtgggtttacgggaatgagggcaaggaacacctggcccgcccagagtggaaaaccacttaaaggcattcttaagccacaaacaatagcatgagcgatgtgtgtcttaaggacgtgttcctgctgcagttaactagcccaacctattcctttaattcggcccatcccttcgtttcccataagggatacttttaatttaatatctatagaaacaatgctaatgactggtttgctgttactaaatatgtgggtaaatctctgttcggggctctcagctctgaaggctgtgagacccctgatttcccacttcacacctctatatttctgtgtgtgtgtgtttaattcctctagcaccagtgggttagggtctccccaaccgagctggtgtctgcaatggtgtgccaccagataagtacggaaattgccagcaagtgtttagaaacacagcaatttgacatatccatgacatccaagtataggatcaatggattttcttgttgaacagggtagagaccaaaaggattggtccatgacaggttggaaacatcaaacaaatgatccttctccatagttacaagtagtttgagatacactgagctagtgggcaatgatgtctacaaggtatattatttagagtcatgctagctgctataacaaataaaccccaccatttcagtagctcacaaaataaaagttctttttttttttttttttgagacggagtttcacttttgttgcccaggctggagtgcaatggcacgatctcagctcacaacaacctctgccccctgggttcaagcgattctcctgccccagcctcccaagtagctgagattacaggcatgcaccaccacacccggctgatttttttgtatttttagtagagacggggtttctc[131 bp omitted]acattccagcatcagggtctttccacttgctgttcccactttgggaactccattttcacagttttcaagtagctctcacactttggctctcacgtctcagctcaaagaacatcttagaaaggccttctgtggcagagccagcaggatgtttattgactgcctagaccaggactacatttcccagaggcccttgcagctagttgaagccataagacaagttatgttcaatggactgagagcagaagtgatgtatgtcactttagggtgaagactttcaagaagcaggtgcgagttccttattctctcttctgcctggattcaaaagactctgagcccatagaagatggttgaatcaccttatggaagaagcctggatccctgaattactatgtggatcaggagaaatgtctgatgggatgttctatgagtaagaaatgagaagactcttctcaaacgtggaaggagctgctgaaaccaaaatcacaagtcctagagaagcttcttattatctctcagatggtggatgggttccaaaaagcatcctgaaattatccagaaaaacagaaaagagatttcagataaagcaaagggagagagatgctgacagaagaagaccaagaggccacaggggctctgctccttcaggatctaagaaagcaggaaggcaccagtacctcccaccaaggccaacagaacagataccatgagaaaggaaccaagaaaaggacaaatggtgacatgtctccaaaacaaggagacattgagcataagaagcagaaagtgaggccaggtgcagtggctcacacctgtaatcccagcactttgggaggctgaggcaagtggatcacttgaggtcaggagtttgagaccagcctggccaacatggtgaaaccccgtctctactaaaaatacaaaaattagccgggtatgatggtgcatgcctgtaatcctagctacttgggaggctgaggcagagaattgcttgaacccaagaggtagaggttgcagtgagccgagattgtgccactgcactccagcctgggcgacagagggagactctgtcacaaaaaaaataaataaataaaagcagaaagtggccaggtataatggctcatgcctgtaatctcagtgctttgggaggccaaggtgagaggactgcttgaggccaggagtttgagaccagcctgggccacatagcgagaccccgtctctacaaaaaattaaaactgaaaaaaatctagctgggagaattggctcaagtcccagctactaaggaggctgaggcaggaggatcacttaagcccaggagttccagcatgtgatgagccgtgatcgggccatggctccagcctgggcaacagagtgaggtcccatctcacaaacaaacaaacaaacaaacgagaaagcccaggtagcaatgagaatgagacttgcccagacaggcaccccgggtgactgctcctgggggtgcaggccatccattgtcctttggtggtgtctcagtccaaaggcaattgtgaccaaatcacagggacagatcaagtcttctcaaagcagagactggtgaaactttccaaatcatggcggtagggcacgccttgcatgttactgagaacttcctcctctctcttgactttgcagtctgagacccggtcatatctacatgtgtgtttggggcaggatgggcagagacatagcaggaaaggaagtcacaggggtgtgtcctaccccagccaggaagcaggcagcagggaccgctgtggggcatgcctggaggttcttcaccatctgctgagcaccagcataacaatgggacattgggactgtccacctgcactgtgctgttaccactaaccagacaactggctttcgtgggattcaccctgggtccctggggcagaaagcaccctaagtgctcagggccttcctctgaaggggtcactttttccttcattgtcttgggtgatgtaacaagctgtgccagactggaggaagtgagaccaggtgcctgcagtgagctactgagacgcaggtgacagtcacagcagttgcattatcagggagtttcctatggtcatctgaacttcgagggaggttttctggggccgggcattccttcctcattcccatttacctaaattggcccatccttgtctggtaggtcagcacccagcagaggcttctccccatgcacagcactgtgaggttcaggcacctgggcacagtaaccacagtgattcctggaagctggtgggcatgctatcctggggccatctgaactgggaaaagctgtgtgagttcttgggggccagcttgtagcctttttggctggggccaggttgaaggtcttcctgggaaccagagtcaagagcggccacttacattaagcggataaagcccacgactttcttgagctgcttgacagctgtaccaaaaaggcacaaacccattgaggatattatgaaacatgaatacagatgattattttattttggtttggttttgttttggctttgagacagggtcacccaggctggagtgcagtggtgccatcatagctcactgaagcctcaacctcccaggctcaactgatcctcctgtttcaaccccccaagtagatgggactacaagcgtgcaccaccacgcctggctaattttttttaatttttaatagagacaaggttttgctgtggtgcccaggtgggtctcaaattcctagcctcaaacattcctcccacctcaaccgcccgaagtgctgggattacaggcatgagccaccacgcccagccattgccttataattttttactgatgtcagatattgttaattttacagtgttggatgctggattttttttaatctctataaatattcttgaattttgttctggaatgcagctaaataatagcttgatcctttcgggccttgcttttaagcatggttggttagtcagcatcagagaagtatttcatctagggcaggggcaggggtctccaaaccccaagccgtgaaccaatacaagtccatggcctgttagaaaccaggctgcacagcaggaggtgagtggcgtatgggtgagcatcactgcctgagctccacctcctgccagatcaggagcggcattagattcttacaggagcgcaaaccctattgtgaactgtgcatacgaaggatctagattgcgcactccttatgagaatctaatgcttaggcggggcatggtggctcacacctgtaatgctagcactttgggaggctgagatgggctgatcacttaaggtcaggagttcaagaccagcctggccaacatggtgaaaccccgtctctactaaaaatacaaaaattagctgggcatggtagcgggcgcctgtaatcccagctactcaggaggctgaggcagtagaatcgcttgaaccccggaggcaaagattgcgctgagccgagatcgggccactgcactccagcctgggtgaaagagggagacttcacctcaaaaaaaaaaacagggaagaaaaaaaaaaagagagagagagacagagaatataatgcctcacgacctgaagtggaacagtttcatcccgaaaccatccactgctcccaccctccatcccccagactgtggaaaaattgtcttccatgaaaccagtccctgatgctcaaaaggttggggactgctggtctagcgcagacctctcacacctgctgtgtcccaaattgacccacccctgctgcttatttttaccacccctacctggtggtgcgtctgtctccccactcaactgtgagctccgtacaatagggaccagggctgttgtggtcaccatggtgtccccagcatcacccagcacagggtcagctccctgagtttatggaatggtaagcacgaatgaatgggaaaacgcatgccagggaaatgttagggtcatgctctctgcccctaccctccactcagacatgagacacctgtttctgaaatcaaagagcagtaagtccaggatctcattgcctggttccagtcctcctaggacgcaagtcccattttgtcaagaaaataaagggggtgagcgtggtggctcacgcctgtaatcccaacattttgggaggccgaggcgggaggatcgcttgagcccaggagttcaagagcccagaagctgagactagcctgggcaacaagtgagatcccatctctattaaaataaaagtgtttagttaaaagaagaaaaagaaaataaatggaagcatcaaggactgttttgcctctttcgggttagctggtagtgagcgggagaacgagggaaggcgggcggggctgcagtctctccacgcccttttcatttccactcaaggagacctacctgggaagagtgagcgctgcaagacccagcctgaccgcgctaagattactatgcagcgcccgagcccgctgtctgcccggcaaccgatgacgtcactgttggcgcgcccgtgacgtcagaggcgggcgccacacttgaagaggctgagggaggcggtgtcgccgccgcggcgctgtcatggagctagcgcaggaagcgcgggaactgggttgctgggcggtcgaagagatgggggtgcccgtggcggcccgggccccggaatcgacgctgcgcaggtgaggaccgctcctggagtgaggacaccccaccctggagattgagtctccgggagtgagaactccacccctcattgaggactcgactccccccaattccccatcgagagtgacccgacttactgagggctccctaccctgggaggctccccagagtgaggtccctagcactggtgaggatcctccacgagttagctaagacctcgctccttatggaaataggatctccagagtgaggctgtccccgcagcacctcccctccctcccttaacctaaccaagaaggacactcaggagttagccgtggccaccccatcggggattgaagctgtaggagtgatgccccacgtctggtcatgagatggcacttcctggcagtacatcccccacctccacctctggatgtgactgggataacccactcccaggagaaagggagcacccgcctctcccgcgctcccccaccacccgccttcccagggaatgagaataacaccacacttagtgcaaacatccagtccctacaaaaaaaatgttttaccaattagccgggtgtagtggtgcctgcctgtagtcctagctactctggaggctgaggtgggaggatcgcatgagcccaggaggttgaggctgcaaggagctatgatcgtaccactgcgacagagcgagactgtctcttaaaaaaaaaaaaaaaaaaaaggcaaaaaaaagtttgggccttccctcctcaagaagtgagaactccctagtaaaaactccctaccaccatcaccctaggaatgaggatcccacaccctgtgtgctgccccaggcatatgcttacacactgtccccacaggctgtgtctgggccagggggctgacatctgggcctacatcttgcagcatgtgcacagtcagaggtaagctgggctagagcaggggagggggcacaggtgaggcccatagtaactcctctttctgcctctgcactgtaggactgtcaagaagatccggggaaacctactctggtaactgcttcttaaagctatcccctcctgtcttccccactcccatttagccctgtccccaccacagcatcacacctattgccctcccccctagaagccccactcatccgctgactctggcctcgttttcctaggtatggccaccaggacagtccacaggtgagaagcatatgctacaagattctctttcatccgaaaaatgacttgtagatcttctgctctaagcccaaccaggtgctgggtgatgctggggacaatgggtcacaagacagccttgatctccatcctcatagggcttaaagtccagtggaaacagcattagctcagccaggtgcagtggctcacacctgtaatcccagcactttgggaggctcacctgaggcctcatctcaggtgatgagatcacctgagggctccaggaagcgatcagtactgggacaaagatgtggtttgggaggcggatcacctgaggtcaggagttcgagaccagcctggccaacacggtgaagccctgtctctaataaaaataaaaaattagccaggcgtggtggcacacgcctgtaatcctagctacttgggaggctgaggcaggagaatcgcttgaacctgggaggcagaggttgcagtgagctgagatcgcactactgcactccagcctgggcaatagagcgagactctatctcaaaaaaagaaaaaataaataaagagcattaattagctgggcgcagagaggtgggacctggatatgtggcatcaaagctggtgagaagagatgatgggacaggtatgggagagatgctgaggccagtgtgggacccaatgggtgcaaggggctcatatgacacctaaggggaggcttccaggaggccttgggacttctaggtgcagggctccgggaagagatcagtactgggacaaagatgtggttgtcaccagcacagacaggaaacaggctggaagtgtgggtaagacaatcctaggaggaaggagggagggagccaataccctaatgcttctgtgtcagacacagaaactgctgagcaaaaaccctctgccaccagttgaggagcctggtacccccaaaagacaggccaggctgagccccgatcagaccatctgaccctgaatctgatcctcccaggtccgtcggaagttagagctggaagctgctgtgacccgcctgcgggcagaaatccaggaactcgaccagagcctggagctgatggagcgagacactgaggctcagggtgagccatggggccagaagatgggcaccagaatgtggggcgggaaaggtgctgatggccacccctgttcctcccacagacacggccatggagcaggcacgtcagcacactcaagacacccagcgtcgagctctcctcctccgggcccaagctggggccatgcgaagacagcagcatacgctccgagatcccatgcagcggctgcagaatcaactgaggcgcctgcaggacatggagaggtgggcctcagggacccaccctcaccaggctgggtggccagacattctcttagagacctcagggctctgccctgatcccttcttgggttccagaattctggaaccattaggatggaatgtccatgaggccaggaggttttgtcatctcagtcacctgtattttcagtgcctagaatgataccacctgtatacctagaacaccagccctggggaaacagccacaaacagagaacatgtccctgccctcctggagcttatgctgtgacacagagaagacagatagtaaagtaggaaccaaacagaccctatcatttctggtagagatgagtgctgtgaagaaaagcctatcatagaagggagagggagatgctgccctagcgagggtggtcagcgaaggcctctgaggaggggacattgagttggaagaggaatttctgtggagaaggaatagcaagagcagaggtggtgtgctcagcatgcaggaagagcagcccggaggccaatgtcagctcaagtttctcaggcaagaccgagaacctgaggaggtgaggtcgaaggagtggacagagaactgtggatgatgtgttgcgattttaccctgacactggttcatgccctggcttggccacttaaaattgggtgacctaaggctgggcatggtggctcacacctgtaatcccagcactttgggaggccgaggcaggcggattacttgaggtcaggagttcgaaaccagcctggccaacatagtgaaaccccgtccctactaaaaaatacaaaaattagtcgagtgtggtggcacgtgcctgtagtcccagctactcaggaagctgaggcaggagaatcacttgaacccaggaaaaggaggttgcagtgagcctggattgcaccactgcactccagcctgggtgacaagagcaaaactctgtttaaaaaaaaaaaaattgggtgaccttgggcaaggtatttaacttctttctatgtgcctcagattctaagatctgtggaatggggataatattaataccaagcttatagggtaggcatgatcgttaggtggaataaatcatgtgaagtgcttagagaagtgcctgttaaccattgttattctgggtttggtttttttgttttgttttgttttgtttttttgagacagagtctggctctgttgcccaggctggagtgcagtggcatgatcttggctcactgcaacctctgcctctggggttcaagcgattctcctgcctcagcctccccagtagctgggattataggcgcatgccactgtgctcgactaatttttgtatttttagtagagacggggtttcaccatgttgtccaggctggccttgaactcctgacctcaagtgatccacctacctcagcctcccaaagcgctggggtacaggcatgagccaccacgctgggcccattgttattctgaatgcgctggggaaacatcacattattttggacagatctgagcagggacatgatcttcctacagttttaacagaatcactgacttctgggtggcaaacagtctcgtggagcaaaagcagtggggaggctaatgcaatattccagctgggaggtgacagtggcctaatctggagatggctcccgagatctaggcttagtgattcctctgaccggccttgctggcagtgagaggagatggggcacagacatctgttctcccagggaccccagccccagctgcacttctccctccaggaaagccaaagtagatgtgacctttggatccctcacgtcggcagctctgggcctggagcccgtggtcctggtaagagtcctggtcatgggagaaggggcagggagcctggagtcaggcagatgctagggtccccctcaggtcccttcctcctcttctccctagcgtgatgtccgaacagcctgcaccctccgggcccagttcctgcagaacctcctgcttccccaggccaagaggggcagcctcccgtgagtgtccctagcccccagagaccctgtaaagaccctgggttttaagtgggggtctcttatttattaattcctcagacactgagcttctgggctacgttctgtagaaggggacttccaggctgggaatagaaggagacagtctctcatcacaaacagtgacagccaggtggtcagggctgttgcgggagtgaggaggcctgagaggctctgggcacccagaggcagtgcctttcccagctaagaaggcagggaggggagaggttctctggtgaggaggcttagctggggtgaagggtccagagagtgtcccagatgaacaacccatgtaaaggccccaaagccagcaggttggtataattggggaactcaagtctaacaggcatagggaagatgacagcccctaccttatagggtggtggtgataactagaggataattgacgtgtcttgtaacgttctctgtccgcttacccaaccccacagaacccctcatgatgaccactttggcacttcgtaccagcagtggctgagctcagtggaggtgagagggcagggctctcaggaaagccacaccctcccgctccttgatcaaaacttagggtgccaggacctaactcttgatgacagccctattcccatggggtctcagctcacagccctgccccgatcctgccctgacttcaccctccctccccctagacgctgctgacaaaccaccccccaggccacgtcctggctgccttggagcacctggctgcagagcgggaggcagagattcggtccctgtgcagtggggatgggcttggcgacacagagatatccaggtgtggggcagggtattctcacagttggggaaggccatgtgagtgggtgagctgggacagcctcaggacccctggcccagccacctgctgatggggtagaactgaaacccactgcctggtggggtggcaggactgatactgtccaccctcgagtaccaaggcaaggccgcagcacggctccctcagcagctcttcccccaccccagaccccaggccccggaccagtcagactccagccagaccctgccgtccatggttcatctcatccaggtgaccccagggctcgcctccccaccacattccaagacttccttaatcccctcacccatggatcatgccctgggtgtaccctgattctgtaccccgcttgcaggagggctggcggactgtgggtgtgctggtctcccagcggagcaccctcctgaaggagcggcaagtcttgacccagcgcctccagggcctggtggaggaggtggagagacgcgtcctgggatccagtgagaggtggggggctctccgagaagaggtctctaggccatctcgcttctgagtgtctcagcccattggactttttcagcctctgtggctcctatctctgcctcctctccctgcagtgtctctccctggtttatggtcccttgtgtggctcagtcacccttctctcctttgctctcctccacttgccctgcaggcaggtgctgatactggggcttcggcgctgttgcctgtggacggagctcaaggccctgcacgatcagagccaggagctgcaggatgcagctgggcatcggcagctcctgctgagggagctacaggccaaacagcagcggatcctgcactggcgccagctggtggtgagaggctaggcccagggccttgtggagggccagaggggaggcttgaaaactatggctaagaactgggcctgagccctgtgtggtagcacatgcctgtggttccagcactttgggaggctgaggtgggaggatctgagcccaggagttcaaggctgaagtgaggtatgatcacaccactgcactccagcctgggtgacagagcaagatgctatcacttaaaaaaaaagaatgctgtcacttaaaaattaagaactgggcctcctaggcaagagcccaggtgagactcccaggcagaagcaggacctaagcagagaggcacactgaggctgggagctgggaggagtgggtctcagggtatcctggttcctcaggaggagacccaggaacaggtccgcctgctcatcaagggaaactcggccagcaagacccgcctgtgccggagcccgggggaggtgagatgggagttggggtgaggtctgggtagggctggatctgccaggatggggctgggtggacttgtgatgttgtgatgccccacccacccctccccttccccacaggtgctagctctggtccagcgaaaggtggtccctacatttgaggcagtggcaccacagagccgggagctgctgcgctgtctggaggaggaagtccggcatttgccccacattctgttgggcacgctgctgcggcacaggccgggagagtgagactggggctgccccacccctgccctgcatcccctgccatgggtgactgtcactccctgaacctcctcaaaaaagataaccccagacccccagtgttcccaggctgccagacctcacccttgggtcagcagccctggtcttggcatcctagtccccagacccaccttgaagttcctgggcccccagagcctccagaacccaaggcctcctctcagtccccacccaacccagacttctccccgcccgtaggttgaagcccctgcccacggtcctcccatccatccaccagctgcaccccgcgtccccaaggggctccagcttcatagcgctgagccacaagctggggctgcctccagggaaggtgagtgcccgtctcctgtgacttgtctccccagccccgccccaggtgaccgtccttccctcctcctccaggcctcggagctgctcctgccggcggctgcctctcttcgccaggaccttctgctcctgcaggaccagcggagcctctggtgctgggatctactccacatgaagaccagcctgccgccaggccttcccacccagggtaggtctgccctgccaccccatccagcctccccgcccattcccactaccagcagcctccacgagtccttaccagcaaccccgttgtttacgcagtgcccattgtgtgctaagggctttaaacattctcccttgtttcatctgcacggcagtcccataaggtaagtgctgctgttctctccattctacagagaagggaactgagacgcagaggttagtaggttgcccaaatggcaaagctggaatttgaatccaggtggtctgaaatgggtctgtgctcccaaccactaagctacactgccgtcgactttccacgtgttcattcatcaccgtcacatagtatacctcagcagttcaaagcctgggaatcctctctgccgtctcttcctagctgtgtggcctccccgtgccttagcttcctcctcagtggagtaagcatgaagcaatatcttaccgaggtgctgggcagattgaggcaggggacccacacagggcactgaacactgcctgctatgcagtaagcaccctgtgtctccaatgtgattagcatcattgtctgtgtacacacacagtctcttggagtcatgacgatgaggaaagggacttttaagaaccccagtttacagatgaggaaactgaaggttagagaagtcattcattcctggattcactcaccaaatactgggtgtctaccaggtgccagcccagatggcttgatggggagtgaggagaaaggtccccaccccaggggtttccccagatggaagtaaagagtaaagaatgaaaggataaatacatggaagaggagaattgatgagaaatgaaccggcagtgccagcagcactggaggaagagactgttcaagcctctgagtttggggctccctgccctccacttcttcacaaggggagggaacagtgtgcaggagcaatgagagcagccccagaccccacacggcctctgcccacctcagcctctgcctaccacgccctctgcccacctcatgtgttttttgtttttgcttttgtttttttgagacaaggtctcattctgtcactcaggctggagtgcagtggtgccatcctggcttactgcagcctcaacctcctgggctcaagccatcctcctgcctcagcctcccgagtagctgggaccacaggcatgcaccccacacccagctaattttatatttcttataatcatgggcatcttgaactgtacacatctatcatggaactcctggttctctctactccaaaaaacaattttgttcctcttcttggtttccttccttgttaaattatctcaccctcctcatccaagtgctgcacccagaaacccaggagtcatcctgaatttctccatcaccctaatccccccaccctcaccagcttcagcctctcagcaagccctaagggtcccatccccagagttctcccatcggtcccctgccccagtaattccacctgacagcagacggagctgaacaaagagccagtgtcgtgatcaaggtcacagggcagggatgggatggggtcaggattcaggcccagcttgtctgatcacgctgctcgtctgcacttgctgagctgggcctgttctgtgcacatggagaggtaggcccagtcccagtcccagaggaaagcaccgctagggtgaagctagagcaggcggaggaggaagccttggagcgagagtgttggaggggcctccaggaggaaagatactctctactgtgggccctgggaatcggccaggctttgccacatcatgaaactcaaatacctgctgaagggcttggactctgccttgggggcactggagaaccttggagggttctagacaggagggagagcatcaaatttaggcttcaggaagatcactgtggtgtagtgcggagggtgaaccagagcaggagactgaggcctggagcagaggagaggaagaaacgctcaggagactgagcggacaggccatggagattgatgggctctcacggggagggaggaaggcatccagaaggaggcctggatggggctgggggtggtggactgcccttgagatgaggatctgggaggagggacaggtcctcatctcaagggcagtccctcagaaggggacttccaggctgggaagagaaggagacagactcatcattggtttgcgggagctgctgaggtcaagactaggggactggagaattggggactcattgctgtaaggtaccagcgagccagaggactcaaagctgcctcctggctttctcaccctcagagctgctgcagatccaggcatcccaggaaaaacagcagaaagagaacctggggcaggctctgaagaggctggagaagctactgaaacaggcactggagcgaatccctgagctgcaggggatcgtgggggactggtgagaggggaacgtgccgcggatgggaaacagaaaagtcaggactcaagctgggggcctgatgagaaggagcaggccatggttttgcagggagggtctggagggtcagtcctttcctcgttgacgccatgccattccccaggtgggagcagccaggccaggccgccctctctgaggagctctgccagggcctgtccctgccccagtggcggctgcgctgggttcaggcccagggggccctgcagaagctgtgcagctgaagagagggttcaaacggaagccgagaacttgacactgttcaccccaacacctcacctcccccaggacatttggaagaaagcagcgccaggattcctcggcagtcgtccccacccgcacctgcagtcccctcatgtgctgttctgctgccccactcagctcctggaccctgtcctttcatcccgctaaagcaccccctaaaaccccttcatcactttcattctcagcaaaaagtaattgagcacctcctctaggcgctggggagtccacactgaacaaaagaaacagaaaaccctgtcttccagcagttgagttctagggcagggagacagagtttacaagataaggaaaatatatatgtagtatgctgcaagttaactgctgtgtgggaaatccagcagggggtgggatgtgtgatttgaattgagggccacactgcccaggtcgtgctccgtcaaggggtgagcaggagcaacaggggtggctgagtaagggcttgcagctggaggcaacagcacatgcaaaggccctgagccaggatgtgctgcaataagggccactgagggggacagtgtaggttgggggtgaggaatgtattaaaagatgagattgccttctagtttgtatagtttctttttttacatgtaaatcagccatttggaatttatcctagcacatggatccaattttgtcttattttacatatatcctagtagcacttactgaaattcccagtcagagtggcagttgcctctgagggaaggtgggtggcagggatcaactgaggaggagacacagaaatgtcctagctgatgggaatgtgctgtgtcaagagcagcggcggtgacgcaggtgtagagatttgtcagagctcatgtagttgtagtcttaaggcctgtgcatttcactgcgtgggttactcaatttataaagcaaagcccttacacttttgagatgccacctttttatgcactaaatttccatgtttaattgggttatatctggcttctctccagacctgctttgtatttaactctccatgtgtcattcctacagtagcttaatagaaaggcttgtgacacattgtcatatctgttcttgttttcttttgttttttttttttttttttttgagatgcagtctcattctgttgcccaagttggagtgcagtggcatgatctcagctcactgcaacctccgcctcccaggttcaagccattctcatgcctcagcttccccagtagctaggattacaggtacgcaccaccacgcccagctcatttttgtacttttagtagggacggggtttcatcatgttggccagactggtctcgaactcctgacctcaagtgatctgcctgcctcggcctcccaaagtgctgggattacaggcatgagccaccgcgcctgaccacattgccatatctgaaatggctggattctcttaggtgcttttctttttctttctttctttctttttttgagacagaatctggctgtttcccaggctgaagtgcagtggcatgaactcagctcactgcaacctctgcctcctggattcaaacaattctcatgtctcagcctcctgaatagctgggattacaggcacccaccaccatatctggctaatatttgtattttttgtagagtcggagctttaccatgttggtcaggctgctctccaactcctggcctcaagtgattctatcgcctctgcctcccaaatcttcacctgctgggattagtttcccctgtctcagtaaattttttttcccaaactaagtgaacattagatttaatttggctggccccagaagaaaaacatgcacagatggtagttttactggtgttgcagtaagttttcaaatttggaagtttggcagctttatgatcttgaaccttgctgtccatctctcacacaactcctctcttggcctccagagtccctttactctcccagctttcctcctgcccctggctgctgtttcccagcctttccacattggctttcccatgtagtccttagtgtgtctgctcctcctctctctcctcatcacagttcccagcccccaccttcaactgaactcaacaaaatcttcaacttcatacagtagtcacattgttagtaataacactggcatttttattttgataaaatagaccgtttaaatttttgagattctaccttatattttttgaattatatactaaagcaaataagtagtgatgtaatgtcattggggaccaagatttttagtgtaaatgaaaaaagataacaaatataaactcaagtaaacaccctgtagtctttcacatgaattggaaatatcagaataaagtcatgatttttctctttctaaaaaatatgtatttccctagttaagtcccctgaaaaggtctaaatataatgacaccccagtaacactgagcagcactagtatacagactgtggtctctataagtgccatttctgactaagaactagggacttttgtgaaaacagctgattccaggtctggggcaagaaatgtgcaaaatgtgtccaggatattttgtgccaggaagcaaagagtcctccaagactactgtggccaagtcaaaggaactcaggagccagtctgaagggctgtcactcaccaaaggtgggacatgttgagcagcaaaaagaaccacagtggtttgaagcacatcaaatatgcctgaatgtgtaagttcatgttgatactcatatacctcattgaaatcacctttgaagagtactaggaacccactcattattttgaaaaattttttatatataaaataatccagcatgttctctatttttcttatatgtgaacaagtaaccaacttttttttttttttttttttgagacagggtcttgtgctgtcacccaggctagagtgcaatggtgagattttggctcactgcaacctccgcctcctgggttcaagtgattctcgtgcttcagcctcctgagtagctgggattacaggtgcgcgccaccatgccaggctaatttttgtatttttattagaggcggggttttgccatgttggccaggctggtctcaaacttctgacttcaggtaatctgcccgcctcagcctcccaaagtgctgggattataggtgtgagccactgtgcccagcctaagtaaccaaatttctgatgaagaggttatttatggaagaatcacaactaataacttcagagaaaatactagaattcaaaaaccactatttgctattaattaatctagtgatggatacaggtaatgatgatcaagggctactaaaactattaggggaaaggttgattgggcttcttaaaataggtagaccaggatgacaccactgatcaatcctgatgccaaaggaaggcaaccagacatcttgtgcttctgatgggatccaataggatacaagggatatgataccatacaatattatctatgaagtgtgcttttaccaaattaaacctaaatctcatctagccttagctctcactacaagcatatgggaaaggggcagaaggcagtcagaaacaagtgaaacaaaaaggatgtaattagttaaattcaaaatgtgtgacaccctataggataaatgatccagtttcttcaataaagagaaggcaaaagggggaatggagaaagaaagaagaaagggagggagggaagaagggaggaaggaaggaaagaaagaaagatggcaggcaggcaggtattcatttgtactgattcatactgcagcttcaagaaaccaaggcagccaataaaattaaattttcttttttttttttttgacacggagtctcgcactgtcactggagtgcagtggcacaatcttggctcactgcaacctccgcctcccgggttcaagcgattctcctgcctcagcctcccaagtagctcggattacaggcgctcgccaccacgcccagctaatgtttgtatttttagtagagacggggtttcaccacgttagccaggctggtcttgaactcctgacctcgtgattcacccgccttggcctcccaaagtgctgggattacaggtgtgagccacctcgcctggcctctaagtttttcttgttggtaaacatctgagcaagcaaaaatttaagttttgacaggaaaaaaaaaagacaatcaaatgcaatatttggaccttgttttgatcctgattctactatcgtataaagacatttttgagacaaggaaaactgaacacggtctgggtgttagatgatactaagaaattaatttgatggtattcataatggcatagttaatggtattttttttttcttgacactgagtttcactctatcgcccaggctggagtgcagtgacgcgatctcggctcactgcaacctctgtctcccgggttcaaacaattctcctgcctcagcctcccgagtagctggaaccacaggcgcacgccaccacggccggctaattttcgtatttttagtagagacagggtttcaccatgttggccaggcgggtttcaaacccctgacctcaggtgatccgcccacctcgacctcccagagtgctgggattacaggtgtgagccactgagcccagcgttaatggtattttttaaaaatagttcttatcggccgggccgagatcgcgccactgcactccagcctgggcgacagagcgagactccgtctcaaaaaaaaaaaaatagttcttatctgttaaggagacataatggcgcatttatgactgagttgatgtctggaatttgctttaacatactccagcaaaaaaatataaaaataagaaaagtataaggccatgcgcagtggctcatgcctgtaatcccagcactctgggaggccgaggcgagtggatcacttgagatcagaagtttgctaccagcctggccaacatggtgaaaccccgcctctactaaaaatacaaaaattagccgggtgtggtagtacacacctgtaatcccagctactagggaagctgaggcaggagaatcccttgagtccaggaggtggaggttgcagtgagccgaggtcacactactgcaatccagcctgggcgacagagcgagactccgtctcaaaaaaaaaaaaaaaaaaaagaagaaggtactttgtaacattctccccgcccttgagaatgtactttataagcctatcccaaacctgtaagaactaatgataatcccaccaccctttgctgactcctttttcggactcagcccgcctgcacccaggtgaaataaacagccttgttgctcacacaaagcctgcttggtggtctcttcacacggacgcgcgtgacaaagaagtatagatcaagtgaaatccagaagtgttgaatattggtagcgtttgagatgtacttaagagtgcgttatactattccccttaatgtgcatgtttgaaaatactcagaataaaacacttgtgagggctacgggaaaaaaaaaagggtcagctgtggcccaagaaaggacagggaccaagcccacggacgtgctcctctgagttgcactagtctctgggccttggctcccaccctgaacagctctcatctttaaatgtcttcagctgtcctcctccaggaagccgggtcaggcgcttcctcccgggcgtctccggtcttcctggaaaccacaggtcgggtgtcaacctactccaggataggggccccgaggggccagccaggcctcccagccttgcccaaccctggggttgacacggactttagcgtctttttaaacttccggcgcgggctctgcggtggcacaggagggtcctccaaactttcctgcgatctcaaaggtccagattccacattggggatgggcccaactgactttgcttcgctctcattagccggtggtcctccaggaaagcggggccgcctctccgctgtgctctcataggcccaggttcttgcgttcgtgtgtccttctctcactctgattggcctatattccccctgagggtgtggccaaatctcattggctctcgcgcccgaatgtatgacgtcatgcgccagcgcccgtcgcttttgctggacgtcatcctcgggagcccacccggacgaagggggagagtagacagcagaaccagcggcggcggctaagcagagactgtagtagcggcgacagcgacgacggcagcgatggctggggcggggccagccccgggactcccgggtgcaggaggacccgtggtcccgggtcctggcgctggcatcccgggcaaaagcggcgaggaacgcttgaaggaaatggaggcggagatggccctgtaaggcccgcgacagagagtgataaaagtcgtcccagagccagagccaccgaatctcggagcctccaggcctcgataggccggagatacggctctaacatggggaagtgggaccttcgggattgtgggggcggggataggggagaggttggcaggggtgagggtcccctcgcgatatacccacagttccaaaattggtacgaggtcctgagcgctgatgtctgttctactcctccaggtttgagcaggaagttctgggggctccagtacctggaatcccaactgctgtgcctgcggtgcccactgtccccacggtccccacagtagaagcgatgcaggtcccagcggctcctgtgatccgcccaattatcgcgaccaacacataccagcaggtacggctgagctaaggcatgtaagtcagggaacacaatgcctcgaacagagtaggtgtttgtgtacagagagctgttgacgttttggcttgttgactaattagcatgacaaatattttatatgccaggcactgagaacacagtaatgactgagagagacatttctgccctgtgggagcttatattctagaacatgttgtccagtagagctttctgcaatgacgagactgttctgatatatttaaaatttatatttaatagttcgttattctcattagtcacatttcaagtgctcagtagccaactatatatgactagtagagaaagagagagaaattattaagatgaaaataggctgggcgctgggcgtggtggctcacacctgtaatcccagcactttgggagaccaaggcgggcagatcacgaggtcaagagatcgagtccatcctggccaacatggtgaaaccccatctctactaaaattacaaaaattagctgggtgtggtggcacgtgcctgtagtcccagctacttgggaggctgaggcaggagaatcgcttgaacccaggaagcggaggttgcagtgagctgagattgcgccactgcactggagcctggtgacagagcgagactccgtctcaaaaaaaaaaaaaaagccctgaggcaggtgcatacctgttgtgttgttgtgttcaaggaacagcaaggagaccagtgacagtggagtgagcaaagaggaaagtgggaggagataaggacagagaggtgaggccaaatcttgtagagccttatggccattttaagaaccctggtggccaggcacggttgctcacgcctgtaatcccagcactttgggaagccaaggcgggtagatcacaaggtcaggagttcaagaccaacctggccaacatggtgcaaccccgtctctattaaaaatacaaaaattaggcgggcgtgtcggcgggcgcctataatcccagctactccggaggctgaggcaggaatatcacttgaacccaggaggcggaggttgcagtgagccaagctcgtgccactgcactccagcctggacaatagagcgagactccgtctcaaaaaaaagactgtaagggacaagggcagaagccaggagatggaggaaggggctagtacagtaatctagacaggagttaatggtggcttggatggaggttgtgcatgggagatggggaggacaggttggacacagtttcagtgggtgctaagtgctgtggggaagatgaaataaggtggtgagagaagttgctgctcagagagccctagtgtgatccaaaaagcctccccgagaagtggcattttagctaagacctgagatagccagccacatacagagcacaaagcatgaagctcttggtctcttggggtgagctggccgcagcagatgggaatgctgagtcaggcccctcaccctgacctcttcctcgacaggtccagcagactctggaggcccgagcagctgctgcagccacagtagttcctcccatggtgggtggccctccttttgtaggccctggtaagtaaagagtagcaaggtgagggggttgggcaatcaggcagggtggtaaaaaggtgtgcacaggactctcctcccaccatccttgcctctcccctcccaacagttggctttggccctggtgatcggagtcacctggacagcccagaggctcgagaagccatgttcctgcggcgggcaggtgagtctggggccagggacccccacatttaatcaggcactcttgtttacatgacttcagcctcttgcctaaatccttgctctaaattaccctttgcctttgatcccaacttgatgttgtcatcctaaagcacgaacctgatcatgtcctttctgatgatgtcaattttgttttaacctgatcattgcaaaccaaccctcctgctgtcagtcctaattcccagttaccacagcacttaacacctcataacaagctatataatttcttatttactatggctatcatcttttgcatcctctaaaataaaagctccatgaggggcagaagtctcagtatctgccacataggaagcattatgtactgtctgttgatgggatgaacggactgttgagacaagcgccaggcttttcccctggcagtcacaaccctacatgaccttgcttcttgcagggagagatccccagcagcccgaacatttctgggatgtgccagcagtgcttttgttaaggtcccttctctccctgctcactgtcacccagctgtaatcttccagccatccttcccccccaggccattttctacattccaccttttgttcttcaggtaacctttactcacactgtcaatttgtaggacattacttccttatatgtatgaaaaggatgcgtgttcttacttggatgtaaaattctggtataatctcggttaaaccaaacgtgctacttatgttacctaaatcctgttatacttattaatctgatgatctctgagaagttgtaatgtctcttactttttagtatggttttgatcaaaatgcaaatctgacctacttcccctgcccagcttccaaccctgctgtggctccccagtgccctcaggaggacacccatggctcagccaagaatgctgtgctttaagaacaaaaaagctctactggggtgcctgctggctgctcagcccttctcatgacactctctaagccccactacttctattacagttacactaaactgaaaagggaaaggttttgcttataaatattcttcctgccaataatattcccactcaccccttgcctaacacttcattgccccttgggtctcagctcacaggtccctttctccaggaagccttccctgggcctggctgggtcagagggctcccctctcttagcactgatcccactgcctgggcttccctgcttccagcgctggtccccactggctctccttctctagtgatgtctccattccctcctcctctggaccaggagctccctgagaaccctgggtctgttggtgtgtccccagcattgcctgccacagggctgagccagaggagcttctcagtggtaaattttcatggaatgaaccaggggagaggcccccacatctccaggagggctccccagactcttctccaggatttcttgatgctgagagtgcacacacacacacgcatgcacacacacaccttgtcccaagtgcccctgtcccccatgacacacacccccatctctctctcccacagctgtggccccccagagggcccctatcctgcgtccagccttcgtcccccacgtgctacagagagcaggtgaggggccagggtcatcatccctgccacataactccccccaggccctggaactccccactaacaccctgacagattccgctctctcctctgcagcagccggcccccgccctatggccctacggccccctcaccaggccctcgtgggcccccctctgcctgggccccctggaccacccatgatgctgccaccaatggctcgggctccagggcccccgctgggctccatggctgcactgaggccccctctggtgagtgtgaacagggaactaacggtcagatgtgcggtggacggggagaccatccatcctggcccaatgggctatgtctgagttggcctctctcctgactttctgtttctctaccttctcactctgcctttgtctctgtctctttctgcatctttctgtggcaaaatctgttctctccttttgtgaagggagtacagagagaaacatgctattggaatatttctcttttgattgttactgatgttcttgtctgtggctgtctctctctgcctgtgtttctccttctctgtgtttgtctggctggagactctctgcttgggtgtctcttggctgctctctggcccccaggccctttctttgttggatggaatggagatgacagtaaagtctgagcctgtgagccggcccccctcatgctctcctcttacccacaggaagagccagcagcaccccgagagctgggcctaggcctggggttgggcctgaaagagaaggaagaggcagtggtggcggcggcggctgggctggaggaggctagcgcggctgtggccgtgggggcaggaggtgccccagctggccctgcagtcattgggcccagcctgccgctggccctggccatgccattgcccgagcctgagcccctgcccctcccgttggaggtcgtccgcggcctcctgcccccgctgcgcattcctgaactcctgtccctgcgtcctcggccccggccccctcggccagagccacccccaggcctcatggctcttgaggtaagcagggagcctagcggtgaagggacagaagggacggggggcagacaggagcccaggaacttccacacagacagaccggacagcaggaggacctgggggagggaggcggacacatgtgccccacatccagaagcacatccagcccttactgtggtggcaggagggccggggaccaaaggacagtgggagaccccaataccaacccctttgcacctctcccctttcctctgcaggtcccagagcccctgggtgaagacaagaagaaggggaagccagagaaattgaaacggtgcattcgcacagcggcagggagcagctgggaggaccccagcctgctggagtgggatgcaggtaagctgctgaagctcgaggtcaggcgtggctcggccaaggtcagaccaggctgctgtccttgggctgcagactgggagggtgaaccctctcagtagggtgggcgctgttgttagcccaccttggggaggggaggctatggctcaggggctggttcttcacctagccatgggccggagcttggtggaggtgacggggacatggggctttgtagcctgttttactcatgaggtgcctggcttcagagagcattctttttttttcccaactcttaggataaaaattttttttttttttttttatgagacagagtaccactctgtcgcccaggctgcagtgcagtggcgca[131 bp omitted]aaacacccgtctacccaccacctagattctgcaattaacattttgctgtgttcacttttttcctctttgtgtatgtatctggtttctttgtttttagctcagtcatttgaagcaagttataagtgaattaatcacttctaaatatctcagtatttatctcctaagaaaagagatattttggccaggcacggtggctcacacctgtaatcccagcactttgggaggcggaggcaggtggatcacttgaggtcaggagttcaagaccagcctggccaacatggtgaaatcccgtgtctctaaaaatacaaaaaaattagccaggcttggtgggaggcacctataatcccagctactcggttggctgagacaggagtatcgcctgaacccaggaggcagaggttgcagtgagccgagatcaggccactgcactctagcctggcaacagaacaagactccatctcaaaaaaaaaaaaaaaaagaaaagagatactttttgcatatcataatactattatcaagtctaagaacattaactaattcggtatcttcttttcagtttatattcgtatttccctaggtgtcccaaaactctgttagaactattaatgtttttgccctgaaccagcatgcatgcagttttatgtccttcaattatatctttttttttttcttttttttttttgaaacggagtcttgctccatcgcccaggctggagtgcagtggcgcaatctcggcagctcactgcaacctccacctgccagggtcaagtaattctcctgcctcagcctcccgaatagctgggactacaggcgcgcacgaccatgcttggctaatttttggtatttttagtagagacggggtttcaccatgctggccaggctggtctcgaactcctgaccttgtgatccgcctgcctcagccttccaaagtgctgggattacaggcataagccaccacgcccagcctcgattatatcttaataagaacggtctctttcctgcctctttgttttgtacatattttttgaagtgtccagggcagttgtcatgtatgatgtcccaccttctgagtttgtccggttgtttgctcctggcattgcctaacttgtgcttagagtgtcccatatcacagacgccatggggcagccgtgcaatggctgaggaaggagatggacccctcctgcttcagtgtttgacttccaccccctctcctgggaccgtctacctggcccagagaagaccctagctctgtgaccttgggcaagtcacttagcctggttttgttttgtttcttcttttgttttttttttttttcttttttttgagacagagtctcgcactgtcacccaggttggagtgcagtggtgtaatcttggctcactgcagcctccgcctcctgggttgaagcaattctcccacctcagccttccgagtagctgggattacaggcacccaccaccacacccagctaatttttgtattgtttagtagagatggagtttcaccatgttggtcaggctggtcttgaactcttgagctcaagtcatccacctgcctcagcctcccaaagtgctgggatcacaggcgtgagccactgtgcttggctcacttagccttttaagcctcatattcctcatcccctcccttgtggggacagggattcattgggacagagcatgttcagtggaagcacaggcccaactcagaggcagcatgagaatgtcagctgggtgcagccatggcggaggagcaggcagcatgtccaggtctcaagggggagttagggcaggccttgccaaggaagcagggctgaggaaagatgaagcccatgttcctgaggtgccatgacgggcagccagtgggtgacaggggtccaggggaccaagggacaccaaggctcagaggaaaggccagggctagggcagagttaagggtgttactacaggaatgagtgaggtggccctggggtggggagggcagtgcagttcaaggttaaaagtaaggactggagccagatgcctgagctcttgtcttagctctgccgcttcctgcttgtgtcactgtgggcagtgacttcacctctctgtgcctcagtgtaaaagcatggttgggagtgccagaaatggaaacacccctccaggtgccagcagagctcctggcgcagggtcagtaggtgttgaccattattactaagaggtccctaggcagagactagatacctccgaaaaggtgggatcgttcagacaaggtagacactgggcaaggcctctgcatcctctgatgtcatctcttccccatccccagatgacttccggatcttctgtggggatctgggcaatgaggtgaacgatgacatcttggcacgcgccttcagccgcttcccatccttccttaaggccaaggtgatccgtgacaagcgcacaggcaagaccaagggctacggcttcgtcagcttcaaggaccccagcgactacgtgcgcgccatgcgtgagatgaatggtgggtgcggcctcccctgggaactgcaggcgcggcaggcgctggcctaagcctgacccgagcctgccttgaaccctctgtctccacagggaagtatgtgggctcgcgccccatcaagcttcgcaagagcatgtggaaggaccggaatctggacgtggtccgcaagaagcagaaggaaaagaagaagctgggcctgagatagggtctgtggccaggcacccgctcccacctggccgggcgctggctcctccctcagttctctttggaaaacccccagctgtccacccatcccctgccccaaaaccagtttcaataaatttacgttcatttccacccctggctgggcatggaagcacgctgtggggagcagggcttggcttccccacagctggaaatggcggggagccttgagagtttacccaggcaaacacccaggcgggggcttctgagcccttcctgcgcacccattccctcttcaaacctcttccacacatgctgagtgctgcttattccagaggagaaaggggggccaatggcaagggtgaagccaagctgaggcccatccccgtgtcctggctacttcctgtgttctcagcaccaaggtaggagatctaggcccttcccttctggagctcacaggcttctaggccctcttccatccagcagactctcaccaagggtctgaacagtgcttgaggacacaatggtgactaaaagtcctgggccctgcaccgttagagctcaaggtccagtgcagaaaataggcccggtgccctgacgataagagcccagagtggtcagggcaggatgggggcgctgacctgtgggtgagggggcccttcctgaaggaaccgtccacccccaagtctcctctggggctttccagcttctccagtctgccatgcccagccagctcaccatgctctaagtctcggtgggcacctctatctctgtctctgtgggtacccctccatttcttgtctctaagcttctatatccctgttggtctctgttctctcccttggagctgggaaatgaaaaaggaggagagacccacagatagagagaacagagacttggggtctgttcccctctcttcccagctccaagctggcctctgcctgtctgaagaggtgtctgtgcagggccttgaatgccaggctgagggcttaagctttacgcagaaggcagcagcaagccccaaaaagctgagaaaattcaagcagcagcaaggtcctgggcagcacagatgtgcgctgtagaaagggccctgtgaccggctgggtgcggtggcgcacgcctgtaatcccagcactttgggaggcaggcagatcacttgaggtcacgagttcgagaccagcctggccaacatagtgaaaccctgtgcctactgaaaaatacaaaaattagttgggcgtggtggcgggcacatgtagtcccagctacttgggagggctgaggcaggagaatcgcttgaacctggtaaaaggaggttgcagtgagctgagatcgcgccactgcactccagccttagtgacagagtgagattctgtctcaaaaaaaaaaaaaaaaaaacgccctgcgaccaccactgtggctggaagtctagaaggctggggcagggactgggccagaggagggagatggcaggtttgagtatggggaggagtggagggtctcccagggacacagccatcggaaccctccattaggagggagcaggttgggcaggactttgtggggcataagtcgggggatggacaataccaaggcctctcagggaccgaggtcccccaggagaggtgtcgaatttctcctgttcctgtcttccccgccttactgccccctctctgacgtcacattttccagtctggtcagagggtgagagcctccctggcaggaagtgccctttagccccctgccacctgggccagaccacccagccccaggatcctcaaagccccttccccccatcactagtcttttctacccctgaccccccttgtactgacagcaagcatagggtcacgggaggagatgggaagagaggatggctccagaaaggacgcttccaaatgcatgtgattctcacttccaagtgggagcagaacagcaggtacacgtggacatgcagagtggggtaacaggcactgcagactccaaaaggtgggagcgtgggggaagctgaacagttaccagttgggtacgttgctcaccattcgggtgcactaaaggcccaggccagtatactggatatactgacatatatccagtaaggaatctgcacttgtaccccctaaatgtttatctttttttttaatgcacacaagtcttcctgagaacaagaagagacacacacacatagaatgtggcaagcagaggtagagatggcgctgtgagcaggaggctcagaggcagagatgagaaccatcagagactgtgcagtgggaagggggacggggagaaaaccaagagacagatggagacggacaaggagatgagataggaacactcaaagacagatggggagggacagagatgtcagaagagaccaggtgacaaagcctcactggagtcaggcccgtggcaacagagacccagctttagatatgccaacctgaagaaagagggcagagagacatggagagacagacaagaggccagcttcaaggatgggaagccaggactcccttcaggcctccgcgctggacggatagagggaccagtgatgctccagggctctgtggcttaccccacactgattccaatcccagtcccactcccactccatgggacccccggtttactttactgtaaaatggaaggaggagcaatgccacccgctctccagaacggcaagtagttaatgatcaagaggctgggctggggactggaagatgccgatatgcaaaagttatttttaatggtaaatattacatacttattaaaatacagcaggatggctgggcacggtggtggctcatgcttctaattacagcactaaggctaaggcaggtggatagcttgaggccaggagtttgagaccagcctggcca[135 bp omitted]aacatggcaaaaccccatctctactaaaaatgcaaaaaattagccgggcatggtggtgcttgcctgtaatcccagctacttggaaggctgaggcaccagaattgcttgaacccgggaggcagaggttgcagtgagctgagatcgcaccactgcactccagcctgggcgacagagtgagactccatctcgaaaaatattttatatatatataggacacccagttattgaattttacgtgaacaattttatagtttaggtatgtcctaaatatttcatgtatgtatgtatatgttacatgtatagctgtggttttttgttgttttttgctgaattatttgagcaagttacagactttttttttgttgtttctttttttgagatgaagtttcgctcttgttccccaggctggagtgcaatggcatgatcttggctcactgcaacctccatctccctggttcaagcaattctcctgcctcagcctcccgagtagctgggattacaagcacccgccaccacgcctggctaattttttgtatttttagtagagacagggtttcac[135 bp omitted]gttcattttctaaatgatatctttcctcctgaataccattatcaaatctaagaaaagaattctatgatatttcatattcagttcatactccagtttccccaattgtcctaaactattacagcgcggaagggcatggggtctggagaaggagagcagtgggaggatgcctgccttaccttcccccttcatcaaatgagagtatgtattgtacttgcctcatagaaggattcaatgaaggggtatggcacagttggtttcacacaatgagccctcatttaatgttggccgttattgctactattgttattgttgaaattgttgatgtcaatattgctatgattggcactcctgggaagcagccccaggacgccctccctactgggcctggtggaggattgggtgggccttcactcctgctccacgcccccgcagttactctgccgattgtgacgtcagctgacgctgggggcgggtgggggaatctggccggaaatccctcttcctgttgcagataagcccagcttagcccagctgaccccagaccctctcccctcactccccccatgtcgcaggatcgagaccctgaggcagacagcccgttcaccaagccccccgccccgcccccatcaccccgtaaacttctcccagcctccgccctgccctcacccagcccgctgttccccaagcctcgctccaagcccacgccacccctgcagcagggcagccccagaggccagcacctatccccgaggctggggtcgaggctcggccccgcccctgcctctgcaacttgagcctggctgcgacccctgctctgacgtctcggaaaattcccccttgcccaggcccttgggggagggggtgcatggtatgaaatggggctgagacccccggctgggggcagaggaacccgccagaggtgagcgatgaactgaggactagatgcctgggtgtctgggttaggaaggacctgggggactagactcccaagaagccgggggcctggactcctgggtctaacagaggaagagagctggggtccctcactcccaggaccaagattttaggctcctggggaaggagggagcggaggcctggactcctggctctgagggaagctagggctggggcccagactccagggcctccaagtgtcaccagctcacccattgccatctggacttttcccgacccagaacattcagaaggccttcatcgcatccatggacctgtggaactgggatgaggcatccccacaggaagtgcctccagggaacaagctggcagggcttggtaggctgccgaggctgccacaacgtgtgtggggagggtgtccaggtggggcctctgctgaccctaaccccttatcgcctgcagaaggagccaaattaggcttctgtttccctgatctggcactccaaggggacacgccgacagcgacagcagagacatgctggaaaggtggctgcgggctgggacccctaagtgctggagaagaagcggggaggctgggatcctagggcaaagggaggaggggggcgtgcctaggttcctgggactgggtggggaggggccgcgtgcttgacccctgagggtgaaggaaaagggggcgcggggtgctgaaatacgggctggggggccataactcccagtccctgacaagtagagactagagagtgggtagttgaggggtctctttcattgctcacagtcctccctaaactcaggtacaagctcatccctggcaagcttcccacagctggactggggctccgcgttactgcacccagaagttccatggggggcgggtgagtgtggggagaggcggtgggaggtggggactggggtcccgaggcaccggggctagaggtgtagactccctgatctttgaggactgagaacacctgcgccctcaaggtggcatgacctggatccgggtcagccgggccccaagtgccagggttgagagcttagaccctagagtttttgagggggcacctgggctcccctcactcgggatccgttactcctcacagagcccgactctcaggctcttccgtggtccggggactggacagacatggcgtgcacagcctgggactcttggagcggcgcctcgcagaccctgggccccgcccctctcggcccgggccccatccccgccgccggctccgaaggcgccgcgggccagaactgcgtccccgtggcgggagaggccacctcgtggtcgcgcgcccaggccgccgggagcaacaccagctgggactgttctgtggggcccgacggcgatacctactggggcagtggcctgggcggggagccgcgcacggactgtaccatttcgtggggcgggcccgcgggcccggactgtaccacctcctggaacccggggctgcatgcgggtggcaccacctctttgaagcggtaccagagctcagctctcaccgtttgctccgaaccgagcccgcagtcggaccgtgccagtttggctcgatgccccaaaactaaccaccgaggtgagagggccgcaaagactgcggggagggcgaagctggagtcctgagccgggacccaggcacctaagggggcggggcccgggagactgacagtgagggggcgggggcttagggaccaggggctcgaaggaggggccggtggcccgcactccaggtccttggggaggagagggctaagaaactggtagtcttatagggaccaaggggatgaggacccaggctcctggattatataaaacgaaagcgataaaggcccagattcctgggtctccgagatggggaggccaaactcctaaatctctgagactggggccctggacgcttgagtctccaaggctgactgttggatctcagagaagggggggcggatccccttctcgggtcctgggtcccgagttgggaggacccggacctctagatcattgaagtggtgtgatctagggccgggaagactgagtgtgcccctcccttcatcccgcaggtcccattcagctgtggcagttcctcctggagctgctccacgacggggcgcgtagcagctgcatccgttggactggcaacagccgcgagttccagctgtgcgaccccaaagaggtggggcagctcccctgcccagccaaatccgccccgtctcttctagttcaatttagctccgcccaagggctaggttcaaccgcgtagccctcggccccgccgctccccggcccactcgaggccccgcccaacccttctcaaacccaatctcccgcctgtactcctgcctcaaccaacccagtctccaccgggctctgcgaggcctcgcccaggtctgcactgcacaccgcccccaggcccggccctccccactatcgccaagccccgccccttcccactccgaccgagcgggcctctgtcctaggtggctcggctgtggggcgagcgcaagagaaagccgggcatgaattacgagaagctgagccggggccttcgctactactatcgccgcgacatcgtgcgcaagagcggggggcgaaagtacacgtaccgcttcgggggccgcgtgcccagcctagcctatccggactgtgcgggaggcggacggggagcagagacacaataaaaattcccggtcaaacctcttcgcgcgtgctcctctgcagcattcttcccgctgatactgactacagcagctagggagcctaagtgtgcagctccacatgttggaatttggcctccccacctcggagacccaggcgtctgggccttcatctctttcctctcacatgatccagaggcctggatccttgctcgctaaaagactgcagtgtcttagtcctcttctccctgaagaccctgaagtgcgggccaccagccccaagtcccttaagctcccaggtccctaagccccgccccacgctgtcagtttccccggtcccgcccccttaggccccgcctctcgactccgccttcactccctccgcaatcttcgcggacctccctcctcggtggttagttttgggatgaggaaccacccacctccagtgctgcgcaatgatcaaaggagacccagactcagggagcctgccatgtgcccgccctgtgatgagagaggcaaagaaactaaacccaaagcccatagggcctactgtgtccctgccctgtgtcgggatttgtaaaggaatcagacccaatcatgagagtatatctgctgtgtccccttgaagagaagactcagaccctgaaaagggcttactgtgctgtgtgtcctcccagtgcaagggatcatcaaagaattaaaactagtgcttgcaccccaacaccactcactctttccccactccaagctggaggacacaggactcagacctacactgtaaagagagcctacgccattctgagagccactgagcccctaaagagagcctgctgtctgtgagcgatgcgggggatacagcagggaccaagacagccctggaccctccccttaaggagctcacagtccagtgggaagacagacccatcatcagagtgttttgacctgggatgagaagactccaggggactgagggaggccaaaaggagagacctgatctagcccaggaggagaagggtcaggggagactccctggaggaggagacagctgatttgagaagtcaggtaggcaaagaatgtttcaggcagaaggaacaacaagatcaaaggcccagaggcagacgatctcataccactgctcaaaactatcagtgtgggccaggcatagtggctcacacctgtaatctcagcattttggaaggctgaggcaggaggatgccttgaggccaggagttccagaccagcctgagcaacataggggagacccccatctctatttaaaaaattaaaaataaacgtggctacagcagcaacagggaccaattcataaaggatctgtgggccgtggtgaggagcctggactttgtctccagggctcctggggagccatcaagggttttgtttgtttgtttgttttttgagatggagtctcactctgtcactctggctggagtgcagtgatgcaatttcagctcactgcaacctccgactcccaggttcaagcaattctcctgcctcagcctcccaaatagctgggattacaggtgcacaccaccacgcacagctaatttttgtatttttagtaaagatggggttgcaccgtgttggtcaggctggtcttgaactcctgacctcaggtgatccgcctgccttggccacccaaagtgctgggattataggagtgagccaccgtgcctggcccccatcaaggggttttaagcagggaaagggatttggattttaggaagatctcattgcaggggatgaatacatgcatgtaaacaggtaattccacaaataatcacaatgttgatggacacagaatgtgtaagaagaggtccctgacccaattccatctggacactgcaccccagatggtatgtgagaggctttagaggccagatgggggaggaaggaaagcagttctctttcatagctccctctcctagtccctagatgcttccttcatttccacaagaaattcttgcattcagcaaatatttatagaccacttcctgtgtgccaggcactgctttagatacaatggtgaatgaataaggcagacaaaaattcttcctttatgataattcttttctgttgag[133 bp omitted]accaacatggacaaaccgcatctctactaaaaatacaaaattagccaggtgtggtggcgcatgcctgtaatcccagctactggggaggctgaggcagaagaatcgctctagctcgggaggtggaggttgcagtgagccaagatcacaccactgcactccagcctgggcaacaagagcaaaactctgtctgaaaaaaaaaaaaaaaaaaaaaaaaaaaaagccaaattggccaggtagggcagctcacgcctgtaatcccagcattttgggaggccgaggtgggcagatcacctgaggtcaggagttcaagaccaacctgaccaacatggtgaaatcccatctctaccaaaaataccaaaattagccgggagtggtggcgtgcgcttgtaatcgcacctactcgggaggctgaggcaggagaatcgcttgaaccgagtagacgcaggttgcagtgagccaagttcgtgccactgcactccagcctgggcgacagagtgagactccgtctctctctctatatatatattttaagggtagggatttttgtgttttgtgcagcgtgctttctcaacccgtaaagtgcctgatggctggatacggtgggtcacgccggtaatcctaacgctttggaaggccgaggcgggaggatcgcttagagaccaggagttcgagtccagcctgggtaacacagcaagaccccatctctataaaatgcatatatatatccaggagtagcggtgcgcatctgtaatcccagctactcgggaggatgaggcgggagaatcgcttgaacccaggaggcggaggttgcagtgagctgagatcgcgctactgcactccagcctgggccatagagtaagaccctgtctcaaaaatttaaaaaaaagaaaaaaaaaatttaaagaaaagaaatacctgacacagaaaaagcgttcaataaatatttcttgcatgaataaaagtactttcgctgggacatttttctccacacctaccctccagccagccccgggatctataacactctctccgagtgaagacacagaggtgatgagatcgggtaacccacgggcgcccgagccccagccgcgcaagctcacgattgggccagaagtgaggatgaacaagcatttagcccaatagaaagtcgtagttctcttgctgggcgtggcttgaatgacttcagtggcctcctcctgggagggagctgaagccgctcgcaagactcccgtagtccccacctctctcagcttccggctggtagtagttccgcttcctgtccgactgtggtgtctttgctgagggtcacattgagctgcaggttgaatccggggtgcctttaggtgagtgtggagggttctgtaacctgggaccccagtctagcgggctgaggagccggaccccagcttccctgagaacgggttgaggcttccggctggcggcgtccggcctccctggaccccggggccctgttctgttcatcgtaagagctaacaatgatacggttcttccttgatgccaggcaacatcccaaacaactttaattaatttatttaactctcccaccagccctatgagatagggcctgcgattatccccttttgtcagtaaacaggctcagagataccaagcgacctagctgaacctacacagcgaccaggatttggcccaggagtttgtcctccagggctcttcatggctaattcacaggcgtggcctctcgcggcttgcctgggccgcagcctggctcccgggtgtccagtccatcctcccttttggacgttggaggggccgcagcgtcatctccgatgcaccctcatcctcagataccgggtagagatctcgccggtaacgatccttcctactgcgtctgtgccccagcagctggtgttttacaccccacttccccaccgaaagactgttttagtgctccagacccccaccaccaccttgcgtcgcttgaatttgacactgctctgcaagtctctgtatagccccacgactcctaggattccctggaatatagatacttttctctcaggctcccgacgaacactgtcacttcttcagagacattatattaaaggtgtttaaccctgggtccgcagagttggtagaattcaaggaatgctagtacttgaattggggtggggggtggaattgcatctgtgtttttactaaccttttgaggcagcaacctcggtagtactagcagcagcggtgattttgttagcaatgaaaatcatagacattccttttttttgtttttctccttttttgagacagggtcactgtgtcacccaggctggcgtgcagtggagaaatcttggctcactgcaacctctgcttccctgtgcaagcgatcctgcctcagtagctgggaccacaggcacgcgccaccacacctggctaattttaatttttttttttttttttgagacaagatcttgctgtatcgcccaggctggagtacaatggcacaatctcggctcactgcaacctccgcctcttgggttcaagtgattctcctgccccagcctccctggtagctgggattacaggtgcacgccaccatgcccagctaattttttgtatttttagtagagatggggtttcaccatattg[134 bp omitted]ccatgttgcccaggctggtcttgaactcctgggctcaagcgatcctcccacctcagcattccaaagtgctgggattacaggtgtgaaccattgtgctccacccaaaatcacaggtattcttataccacattataacagcaaatgtcacaaaatactatattcattcatgattacttcaaaattgtatttttttttttttttgagacagtgtttttgctctgttgcccaggttggagtgcactggcacaatctcggctcactacaacctccgcctcctgggtttaagcgattcttttgcctcaacatccagagtagctgggattataggcacctgccaccacacccagctgatttttatatttttagtagagccagggtttcaccatgttggccaggctggtcttgaactcctgacctcaggtgatccacccccctggcctcccaaagtgctaggattacaggcgtgagccaccgcacccggcgaaaattgtattccttaatgaatcctcagctggatataactgcttttctttgtgatgctgtgcaggtttttttcacttcatgtactcatggagcctatgcaatttttaaatacatttaaacatattcaggccgggtttggtgtctccgttctgtaatctcaacattttgggaggccaagccgggcagatcatttgaggtcagaagttggagagcagtctgaccaacatggtaaaaccttgtctaaaatacaaaaaaattagcagggcatggtggcaggcgcctgtaatctcagctgttcgggaggctgaggcaacagaattgcttgaatcttggaggcggagtttgcagtgagcctaggtcgtaccagtgagcctgggtgacagagcaagactctgtcttaaaaaaagaaaaaaaaaaacattcagcgagaggtttctgggattcatcagactgctgaggagtttgtggcaccaaaaagattaagaatctttgcagtgtagattatgccaacaacggaggcagcccaccagttatttttatgccgtttaaccgtaggaagtcacttagacaccctgttccttcctcgtctgggcaatggtgatagtaatagttcctaccttttagagtggctataggagtaaagtgtgtagaacagcgcctggcatgtagtaagcactcagtgagtgttagctcatgttatttggggaccaggcttgattttgctgaggagttgtaccccaaccctgccgcgacctcgacactcagatgtgtggattcgccctgcccctcatctctgtgtatgttgagaggcaggaacttgttcacacccagcccattgttccgtgcctgccctcttccattgatcctgggtagtctggcttgctcagggcccctggggcccctgctgacacccactcctttcgcctccaggattcagcaccatggcggaagacatggagaccaaaatcaagaactacaagaccgccccttttgacagccgcttccccaaccagaaccagactagaaactgctggcagaactacctgggtaagcaggacctttccctggccacatacctcgagtcactcaccgcttgcctcttcctaggggacccatccaccccagcctcctcccttttattctgaacatccttactctggaaggcccatgcctctcatcacctgctgttcaggtccaggctagggttacaaactttagttcctgcaatgattttttttttaatttaaattttttattattattatggtttggttttgtttttttccagagatggggtctcactttgtcacctaggctggagtgcagtggtgcaatcatagctcactgcagcctcaacctcctgggctcaagaggtccccctacctcagcctctcgagtagctgggaccacaggcccacactactgtacttggctaatttttttgtagagaagaggtctcagtttgttgcccaggctggtctcaaactcttggcttcatgcgctcttcctgcctcagcttctcaaagtgttgggattataggtgtgagccaccgtgcctggcccctacaatgatttttttttaagctgtatgtgtgtgcgtactgtaacatgtacagaaagcacataacaaacatgtacagctaaatgaataattctaaagtgaaccccttgtgcaaccataacctggagagaaaagcagacattgcccacactctcatctccctgccttcttttttttttttttgagatggagttttgctcttgttgcccaggctggagtgcaatggtgcaatcttggctcactgcaacctccgcctcccaggttcaagcaattctcctgcctcagtcccccaagtagctgggattacaggcacctgccaccacacccagctaattttttgtatttttagtagagacggggtttctccatgttggtcaggctggtctcaaactcctgacctcaggtgatccacccgcctcggcctcccaaaatgctgggattacaggcatgagccaccgcgcctggcctccccaccttctttatgtcctgtctggaacacagcaccccgctctccccagtagagaagtgacgccactaactgggggttatcacatctttgtttttggttttggtttttgtttttgagactgagttttttgttttcgttgcccaggctggagtgcaatgtcacgatctcggctcactgcaacctcttctgcctgctgggttcaagcaattctcctgtctcagcctcactagtagctgggattacaggcacccgccaccatgcccagctaattttttgtatttttttttttttttagtaaagacaaggtttcaccatgttgatcaggctgatcttgaactcctgacctcaggtgatccacccacctcagcctcccaaagtgctggaattacaggcgtgagccactgtgcccggcctcacatctttgttttttaccaccatgtttattattttattttattttatatatgttatgttgttatgttattgatggagtctgtttcttgttgcccaagttggagtgcaatggcacgatctcagctcattgcaacctctgcctcccgggttcaagtgattctcctgcctcagcctcctgagtagctgggaatacaggcgctcgccaccacacccagctaatttttttttttttttttttttgagacggagtctcgctttgtcgcccaggttggagtgcagtggtgcaatctcgactcactgcaacctccgcctcccagcttcaagcacttctctgcctcagcctgccgagtagctgggattacagtcgcctgccaccatgcctggctaattttttttttttgtatttttagtagagacagggttttaccatcttggccaggctggtcttaaactcctgacctcgtgatccacccccctcagcctcccaaagtgctgagattacaggtgtaagccaccatgcctggccaattttatttatttatttgagacagagtctcgctctgttgcccaggctggagtgcagtggtacaaccttggctcactgcaacctccgcctcccgggtttaagcaattctcctgcctcagcttcctgagtagctgggactacaggcgcgtgccaccatgcccggctaattttttgtgtttttagtagagacaggatttcaccatgttggccaggctggtctcgatctcctgacctcatgatctgcctgcctcggcctcccaaagtgctgagattacaggcgtgagccaccgtgcctggccaattttttgtattttttttttttttttgagatggagtctcgctctgtcgcccaggctggagtgcagtggcgtgatctcggctccctgcaagctccgcctcctgggttcacaccattctcctgcctcagcctcccgagtagctgggactacaggtgcccgccaccgcgcccagctaattttttgtatttttagtagagatggggtttcaccgtggtctctatctcctgacctcgtgatctgcctgcctcggcctcccaaagtgctgggattacaggcatgagccactaggtccagccacttttttgtatttttaatagagacagggcttcaccatgttgtccaggctggtctcgaactcctaccctcaagtgatccacctgccttagcttcccaaagtgctgggattacaggcctgagccaccatgcccggctaccaccgtgtttagattcacctctttgtgaactttatacatactgtgtgtattcttttgtgtttggattttttcattcagtaccttctcagatccatacatgctgtggcatatagcttgctcattttcattgctgtccagttttctacaatttattctatgcctgtacacttgtgtgatttccattttggagttcttacaaatggtgtggctgtaaacatctttataaatgtaattttgctgggtgcagtggctcacgcctgtaatcctagcactttgggaggccgaggtgggcagatcaagaccagcctggccaacatggcgaaaccctgtctctactaaaaatacaaaaattagctgggcatggtggcaggtgcctgtaatcccagctacttgagaggctgaggcaggagaatcacttgaacccaggaggaggtagaggttgcagtgagctgagatcgcaccactgcactccagcctgagtgacagattgagaccctacctcaaaaaaaaaaaaaaatgtgttccaactcttgatctgggctgacttgaacccctttcttcacagacttccaccgctgtcagaaggcaatgaccgctaaaggaggcgatatctctgtgtgcgaatggtaccagcgtgtgtaccagtccctctgccccacatcctgggtatgtgcctcctgccagggcccttgggatgctggggtggggtcttagcagaggggagtgtggtggcttggtgggagctcatctgtgaggggcagagggaggacagggcaccacactgtcccaggactcagtgcctttcctcccgcctagaattacctccctgtctccttctgctgatgcctctcaaccagtcagggctctcagctgaggcgaccagggtgctttgctagatgtagctcactcatgcactctccaaatacacactcagcactgggctcccatccctgtgtagctcacaattctgtgcagtcctgtccttttttattaggaacatttttttttctttttttttttctttttttttttttagacaagggtcttgctgtgttgccaggctggaaaggctggagtgcagtggcgcgatcttgcctcactgcaacctccgcctcctgggttcaagcgattcccctgcctcagccttccaagtagctgggactacaggtgtgcaccaccatgcccagctagttttttgtattttaatagaaacggggtttcaccatgttagccaggatagtctcaatctcctgacttcatggtccacctgcctcggcctcccagagtgctgggattacaggcgtgaaccaccgtgcccggccctattatgaacattttcaaagcagagataataattcattgacctcaaatacatccatcacccaaagtgaatagttatcaggatttatccacggtttcttcatctaccccttttcgttttcttctttcctttgctgaagtattctaaagcaagtcccagacacgtcatttcacccctgcctacttcagtgtggacttctaaataatgacacagtaagacagtcctttcagccctgatctgaccaaatctgtcgtcaatatttaatagctctttgctatgcccctgccctttgtttaaaaaaaaaaaaaagtttttaaagacaaggtctcatgatgttgcccaggctagactcgaactcctgggctcaagtgttcctcctgtctcagcctcctgagtagcttggactacaggcatgtgccactgtgcctgtctctctctctctctctctctctctctctctctttgtcgccctctcgctctctcttgctctctttctctctcgctctctctttctcactctttctctctttctttcctttctttcttttctttcttgagccttgctctgttgcccagactggagtgcagtagcatgatctcagctcactgcagcctcagcctcctgaatagctgggactacaggcatgagccaccacacctggcccaatttttgtattttttttgtagaaatggggtttcgccttgttgcccagactggtctcgaactcctgagctcaaagcagtctgcctgcctcagcctcccaaagcgctgggattataggcatgagctaccgcacccagctgaatctttcaaaataaaaaaaattaccctttaacttggcaattccacatctagggatgctacaaaaatcttcatgtacaaagatgcccattgcagagttgttcgtaatggagaatatttggaaataacccaagttaaaacattgatcttgatagtctttatggagactatggtgatctacatgctagcacacagaaagaatgctaagacacaggaaaagtaagttgcagaacaatctatatagtaggagtcaatttgcaaggatggagtttttatggtgtggtatgtgtatgtaaataaagtaggcacataccgctggcacttattatgggccagctatgttgttagacctttttttttttttttttttgagatggagtcttgctctgtctcccaggctggagtgcagtggtgcaatctcagctcactgcaacctccgccttccaggttcaggcgattcccctgcctcagcctcccgagtgtctgggattacaggcgcctgccaccatgcccagctgatttttgtatttttagtagagacagagtttcaccatgttggccaggctggtctcaaactcctgacctcaggtgatgcacctgcttcggcctcccaaagttctgggattaccggcgtgagccaccacgcccagccatgttagcactttacatcacataaggtcaacatgctaacacaaccgtatgaggtaggtactattgttagtatcctcattttacaaaattggaaactgaggcccagaaaggttgagtaacttgcccaaagtcacacagctaggaagtgatggagcagggattcagattcagcctctctgttatccatgctttcatccactgttcgttcttgcaccagtggtcctcaccctttttggcaccagggatgagcttcatggaagacagtttttccacagacagggttggggatggtgtaaggatgagtccagcatattacatttattgtccactttatttctgttattattacattatataataaaataattatacaactcaccatactatagaatcagtgggagccctgagcttgttttcctgcaactagatggtcccatctgggggtgatgggagatagtgacagatcatcaggcattagattctcataaggatcatgcagcctagatccctcacatgcgcagttcacaatagggttcgcactcctaagagaatctaatgctgccgctgatctgacaggaggtggaactcaggcagtaatgcgagcattagggagtgcttgtaaatatagttgaagcttgtctcgctcacctgccactcacttccagctgtggggcccagttcctaacaggccacagaccagtacctggtaggcactggttggggctcggggacccctgccttatagcataaaatgtgagcgtgtatgtatataaaaacgtttatgcttgtaactgcttgtgaggtccacaaagagtagagtgttactttcagggagtgttaacttgacataggccttatatgggccttttcattttttttttttttttttttttagagacagtcttgctctgtcaggctggagtgcggtgtgcagtggtagcatcatagctcactgcagcctcgaactcctgggttcaagcagttctcccacctcagcctccctagtagctgtgactacaggtgcatgccaccatgcctggctaagttttgtattttttgtagagacagggttttgccacattcaccaggctggtctcaaactcctgggctcaagcgatcctcccacctttgcctcccaaagtgctggaattataggcgtgagccaccatgcccggcttattttttattttttgtagagatgggggtcttgccgtgttgtccaggttggtctcaaactcctgagctcaagcagtcctcccacatcggccccgcaaagtgctgggatgacaggtgcgagtcaccacacccagcctccatcattgtttatactgagcatcgcctgtggtcagtggtgggattgcactgtgtattgtttggcaccttttttgcacttgactatgtatcttgaagatccatccattcatgccagaacataaatcagcctcgttttttttcacagctgcctgctattccatctcccctgtttggacaaacagcatagtgttgacttgaggttttcaaagcagggcccacccttggagctctgtacagtgacacatctccccatcgacagctctgcagtgggcctggggttttcctgcccattactctcctcccagcatgtcagcttgttcagaacagtgatttctgtcttttggggtcactgctgattccccggcctctagaatagaggttggcacacagcaggtacctgtggatattggttgaacaaacaggtgggcaaagtgaggaagataagaagtccatccgttcagtttccccactgcggagggaataacactgtctttccacaggtcacagactgggatgagcaacgggctgaaggcacgtttcccgggaagatctgaactggctgcatctccctttcctctgtcctccatccttctcccaggatggtgaagggggacctggtacccagtgatccccaccccaggatcctaaatcatgacttacctgctaataaaaactcattggaaaagtgagactatgcgtgtgaacgggccaggcagtggcaagaagctgggctggaatcagtgccctgaccagggaggggcttgaatgagtattttctctgttttgtttttatttatttaatttaatttaattttttttttttttatgatggagtctcgttcttcacgcaggctggagtgcaatggcacgatctctgctcactgcaacctccacctccagtgttcaagcgattctcctgcctcagcctcccgactagctgggactacaggcacaccccaccacacctggctaatttttgtatttttagtagagatggggttttaccatgtcggccaggctggtctcaaactcctgacctcagatgatccacctgcctcggcctcccaaagtgctgggattacaggcatgagccaccatgcctagcgttttttaacttaattttattgaaccttggccaccctctctgtgccagtcaatgagtcaaatagttgattatacagaataacctaagttcctatgtgtgcaaccaccctacataattttaaagcaaattatatagattataatataatataaaatacataaagattatattttatccagaaataagaaactatatgtatctcttggagatacaatttttttttttttttttttgagacagagtctcaatctgttgcccaggctggagtgcagtggtgtcatctcagctctctgcaacctctgccttctgggttcaaactattctcctgcctggagatacctatttttttaacataattatttacacctaagaaattagttcttaatggccgggcacagtggctcatgcctgtaatcccagcactctgggaggctgaggtgggcagatcacctgaggtcaggagttcaagatcagcctgggcaacatggcgaaacctcgtccctactaaaagtacagaattagccaggcatggtagcacatgcctgtaatcccagctactcgggagtctgaggcaggagaatcgcgtgaacctgggaggcagaggatgtggtgagccgagatcatgccattgcactccagcctgggcaacaagagtaaatctccatctcaccaaaaaaaaaaaaaaaaaaaaaaaagagttcttaatatctaataagcaatctcctgcacaatgtgtaacttctccccgtgttgggacctgctctttcatgctgatcatgatggtagttggaagtcatttaagtaggccaagttgagagctgttcttcatggtgcccccaaaagaattgccacacaataacagcccagaatatccccaacagactcgtcaacagggacctagctagcatgaccagccggaacactcttatggctgaattggtgtgtcctcaaaacctttcaaatggccggggtgtggtggctcacacctgtaaccctagcactttgggaggcccaggcgagtgggtcacgaggtcagggattcaagaccagcctggccaagctggtaaaaccccatctcttctaaaaatacaaaaaaaactataaaaatacaaaaattagccaggtgtggtggtgcgtgcccctaatcccagctactggggaggctgaggcaggagaatcacttgaacctgggaggtggaggttgcagtgagctgagatcacaccactgtactccagcctgggcgacagagcgagactccatccccaaaaaacaaaaacaaaacttcaaatggttacaaacttgtctgatgcattcacatgagcagggatgattcttgtatggagaaaaatggccccagagatagatcttgtgaaatagctgctcatgaagaaaagtggctgtaggggccgggcgcggtggctcacgcctgtaatgccagcactttgggagaccgaggcaggcagataacctgaggtcgggagttccagaccagcctgaccaacatggagaaaccccgtctctactaaaaatacaaaatgagccaggcgtggtggtgcatgcctgtaatcccagctactctggatgctgaggcaggagaattgcttgaacccaggaggtggaggttgctgtgacccgagattgtgccattgtactccagcctaggcaacaagagcgaaactccgtctcaaaaaaaaaaaaagtggctgtaaacaggaccttagtgcacacacagggagcttgagggatcgtgggaggttatggcgtgggttggaagtagcaaagaacttaaacaccatgaaaaaaaaattttttttttgaaatggagtcttgctctgttgtccagactggagtgcagtgatgtgatctctgctcactgcaacctccacctcccggttcaagcaattctgcctcagccttccaaaacgctgggattacaggcgcttgccaccacacccagctaattttttgtatttttagtagcgatttagagagtagtttcaccgtgttgaccaggctggtcttgaactccgtgacctcaggttaaccatccacctcggcctcccaaagtgctgggattacaggcatgagccaccacacccagccaacaccatgaaaatttcaaatgaaacaggacggccagtgaaaagtcaaggtgctggactccttgagtccagctgcctgattctgcccagggtttgccaccagtgccagtgtttcctgtacattcctttagagatagctcatgcatctagaagtatttgtaaatatattgatctgattggatatggtgcccttttgctcacacagcccctgccacactggcctcttcagtgcacaggaactgtgagcaaatgtatttcgacacaccaggctggctccaaccccggatcctttacacttgctgtttgctcgacctggaatgtttggccaccagctgtccacaagctcacccctcactgccttcaggtcttcatttagcgaggccttctctgaccactcagccttcaccttcagctcctccatctttgtgccccttcactccttttgtttctttctcttttttcaatttttatttatttttttagtttttggagatggagtctctctgtcaccaggctggagtgcagtggcgcaatctcagctcactgcaacctcagactccctggttcaagcgattcttctgcctcagcctcccaagtagctgggattacaggcacgcgccaccacgcccagctaatttttgtatttttagtagagacggggtttcaccatgttggccaggatggtctccatctcctgactttgtgatccacccagctcggcttcccaaagtgctgggattacaggtgtgagccaccacacctggccttgtttcttaagcacttaccgctaacatgccaaatgttatccttcatcattgcaccactggaatgtaatttccatgcgggcagatttggaaatatatatttaattccccttttcagctttttttttttttttgagataaggtcttactctgtcacctaggctggcatgtagtggcgtaatctcagtttactgcagcctccgccgcccagactcaagccatcctcctacctcagcctcccaagtagctaggaccacaggcatagaccaccatactcagctagttttttgtttgtttgtttgtttttgatagagacggggtttcaccatgttgcccaggctggtctcaactcctgagctcaggtgatctgcccgccttagcctcccaaagtgctgggattacaggcctgagccaccgcacgccagcctgcattttttccaaatgttctaatctttctcattttattatttttttttttttaattttttttttgacacaagacctcactctgtcacccagcctggagtgcagtggcctgatcacagcttactgcagccttgaactcccaggctcaagagatcctcccaccccagcctctcaagtagatgggactacaggcatatgccaccacacccagctaatttttgtattcttttgtagagatggagtttgcccatattgcccaggctgatctccaactcctgggctcaagtgatcctcccgcttcagcctcccaaggtgctgggattacaggcatgagccaccacacccagcccagctgttaatcttattgatgattaattatacgtgatgggtcacttgtcagttgctgctttcaaggttctctttttatcgttcaataatttgattatgatatgtctggtgatggatatctttgagtttatcctatttgaagattattgagcttcttggctctagattgatggtttttttcatcaaattttgggagttttcagccattctttcttcatatattcttttttacccctttctttttgtcctctccttctgggattcccattatttgatgatgtctcacaggtctctgaagttctgttcacttatcttcgtgcttttttctttctgttccttagacttgatcatctcaactgatctatactcacgttcaccgatcttttcttctgcctactcaaatctgttgttgaaccctctattcctctattgaattttttctttttttttttttttgagacggagtctcgctctgtcgcccaagctggagtgcagtggcgcgatctcggctcaccgcaacctccacttcccgagttcaagtgattatcctgcctcagcctcctgagtagctggtactacaggcccataccaccatgcctgattaattttgtgtatttttagtagagacagggtttcaccatgttagccaggatggcctcgatctcctgacctcgtgatctgtccacctcggcctcccaaagtgctgggattacaggcatgagccaccacgcctggcccatttgaattttttcattttagttactgtacttttcaagtcccaagtttctgtttagttcttttaaaataatttctgcttttaggccaggcatggtggctcacacctgtaatcccagcactttgggaggccaaagtgggaggttcacttgaggtcaggagttcaagactagcctggccaacactccatctcaaaaaaaaagacagtattctttagcattagttccgctaatgattggacaaagatttccttagcctccaaaaaccaataatctcctagcctttgctgaggcatggtgggccatgctttcgacattcagccaggcaattgacaactctgccttcgccactacttctcccaggaaggcacacatcctcaaggtcagcccaatgtaagaagactgggttctcatctctggtctttcttgagcctgcatatactcctgggcatgcacacaaccctatgcatgcatgtgaccttctagatttccaagaatattttggagtttttcaaagccttctcattccccagctttatcttttaaactgtttcattagcctattattggcctcaactgttattcattgcttaggcagctgcctagttaaacaattgcatgcaattgtgtttcacaaatgcccctggggaaataattttgacgatgtatgagctctaagttaggtcaaatacagacaacattgcaagtaggggcttccagggaaccataagacgaatcaaataattctgactttctgggagtgaggcttttatggagtttcatcctcttctgccccgtttggtgtatgccaggctgctagtttccactgagaatgctggcagttaatattcaaggctaccatggagctggaatgggggaatggaactaggccaattaaaaatgtcacaaagtataaaaattagccgggcgtggtggcgggcgcctgtaatcctagctactcgggaggctgaggcaggagaattgcttgaacctgggaggcagaggttgcagtgaactgagatcgtgccactgcattccagcctgggcgacagtgagactctgtctcaagaaaacaaaaataaaaataaattttaaaaaagtcataaagttcactgctcttactaagattcagctgcttttcttgaataaacactttacagatttttgttgttgttgtggagacagagtctcactctgtcacccaggctggagagcaatggcacgacctcagctcactgcaacctctgccttcgaggttcaagcgattagctcctgcctcagcctcctgagtagctgggattacaggcacttgccaccacgactggctaattttgtatttttagtagagat[137 bp omitted]caaattaaccattttaatcggaaaacatctcatgtatcttattaccaaaccagtgccttgacgatgggattttcagtgtcatttgccaaattcgcaggcaccgcagtggggagccactgctcccacagcagaggcaatacacggcctagccttggggttgagaagttctggggacggtgtcgggggccctgggccaccatttttgcatggagccagccctgcgctgcgagggcgtggcatcggagagaccgtggcctcgtgggcagcatcggcggcccctggggacacgcgctggctcagtccccacctccgccagggaagcggtctgatgatacccatttcgcagatgggcaaatccacaagccaagtcgtgccgcccagaagaggcagaaccgggatttgaacctaggtttctcattctgcacctgaagaaataaatgtctggtccatgcgtgtgttggggggcgacggggacttttcttcaaccaagcccggtgtgccccctctcattttctagcacgttcttctcccccatctttgcacttatctcagactcccctcacacacctatcctgggtgccatcctttccctcagcccaccgcccatgtagtcagcctcctaagcgccccttccacctgtcccctcatctccccactgctctgcctcggtccagccctggccttggcaggggtccctgcctgggcctccccacgggctcccggcctcacagaggagcagccacctgtgcaaggtcacacagcaggagagacacttctgggattcaggacccacctgtgggtccgaagtggattttttgtttgtttggttttggagacagggcctggctctgtcactcaagctggagtgcaatggcacgatcttggctcactgcaacctctgtccccaggttcagccatcctcccacctcagcctcccaagtagctgggaccacaggcatgagcctggctaattatttttgtattttttatagaaacggggtttcactatgtcacccagtctggtctcaaactactgagctcaagcgatccgcctacctcagtttcccaaagtgctgggattacaggcctgagctaccacgccccgccctgatttggatcttgctcctattcccaggaaggcccatgtcctagcaagagagacaccaggtggtgcgcacgcccctccacctccaactcctccaccgccaacaaagcctgggacccagaggccatgggtcctacacaatctggtatttcaggtctataaatcatgggggtggcagggagcccatcaaagctgttcatccagcctggtctgccggctcagcctcttgtccaccccactgccgtgccccaaaacacacacacacacacacacaccctccctccttcctgggagactagcccaaggaggggcctgggcgtatatagggagccacggtgggtggggctggccagagaggctgcagacagagaaggtgaggagggggccctgggagtctgggtatggcatgaggggtctgaggctcagggaggggcagtgccaagttcaggccagtgactgccccaccggagcccgggtgtcctcttgtgcaaaatgcctccccaccagggctgtgggtacatcagtaccagcctgggccccgcagagagctggagcaacccctcgaagccagggtgtggctcagagatggggggtccggctggccctttacgctcctggcctcatccctgctcatgtgtcccaggatgatggcgtctgcggcagcagcggaggccgagaagggatctccagttgtggtgggcctgctagttgtgggcaatatcattattctggtgagactcgccccagtgctgggagccgagtggttgtgtggtggggaggggacagtcctgagctcggggtgggggatgagggtccagaactgtctctcgggcagactcagtggtcagcacagcctgggttgaaatcccagctctgcctctccccagctctgtgaccttagcaagcgactgtccctctctgtgccttctttcctcatctatagactgtgtcctcattgtgtgggctgttgtcatgtggattaatccatgtgtggccctcagctcagagaaagtgcccgaccaatgctggctatcaccatcagcatcactatggatataaagtgacagcctggtgcacaggaggccacaagaaggaaaaacaacagtgtctttcaattaacattgggttttggttttgtgttttttgttttgttttgttttgttttgttttgttttgttttgtttttgagacggagtctcactctgttgcccaggctggagtgcagtggctgatctcagctaactgcaacctctaactcccgggctcaagtgattctcctgcctcagcctccagaatagctgggattacaggcgcacaccaccacgcccggctaattttttttttttcagacagattctccctttgtcacccaggctgaagtgcagtggcgagatctcggctcactgcatcctccacctcctgggctccagcaattctcctgcctcagcttcccgagcagctgggattacaggcacatgctaccacacccggctactttttgtatttttagaagagatggggtttcaccatgttggccaggctggtcttgaactcctgacctgaggtgatctgcccacctcagcctcccaaagtgttgggattacaggtgtaagccaccgcgactggccgtgtgtttgttttagagacagggtctcactctgttgaccaggctgcagtgcagtggtgtgatgcttgctcactgcagcctccaactcctgggctcaactgatcctcctgcctcagcctcccaagtagctgggactacaggtgcacatcaccacatctagctaatttttttattttttgtagagacggggtctcactattgcccaggctagtctcaaactcctgggctcaagcaatcctcccgcctcggcctcccacaatgctgggactgcaggtgtgagccaccttgcctggcccatttgtaatgtttatggccatggccatgttcccctcctcggggaataacagcactgtcaagggagggcagatggaccaagcatctcctctgtgccagtccactgctccagcctttccacgtggcatccccttttatccccgaagaaactggcagctggggcgtgggggtcggttgtctggctgggctgtctcttctctcctggcctctgctcaccctcatcgctgctcatggaaggcgaggtctttgcccactttactgagagggcagtggaggctccaaatggggagggaacttgctcgtggagatgcctggtgccagggctgctggccccgagcagaccttcctaacccaccgctctgtccagctgtcaggcctgtccctgtttgctgagaccatatgggtgacagccgaccagtaccgtgtatacccactgatgggagtctcaggcaaggatgacgtcttcgctggtgcctggattgccatcttctgcggcttctccttcttcatggtagccagttttggtgtgggtgccgcactctgccgccgccggtccatggtcctcacggtgagactccaggggttgggggatggggacactgaaaacggagttcagcatcactgagtcatagtagcaggtgcagccccagccactagtgtgagttccccatggtgtcacactcagggatcccaggcatcatctcattcagtcttcccacagcccaataacccaggcttgagtagcagagctgggattttttcttttttttttttttggtaaagatgggggtctca[131 bp omitted]tagctgctttccagagtccatgctcatgaactctgccaataatagcacagctaccatttaataatggtttactacaagccacgagctgttctaaatggtttactggattagttcatttattcctcatagtccaccaagagatactgtcatcatcatgaccctgtttgatgaagattgaaactgaggctcagagaagtgaagtcacttatccagggtcacacattgagacaatggcagagccagtttcaacctgagcagatcggctcttgaggctgtgctcttaatctctgcccacaagaataacccatacttcccaagtgtctctcatgcacctgacactagggtaagcagtttagaaaatgagcttcgtggccaggcgcagtggctcatgcctgtaatcccagcacgtggggaggctgaggcggacagatcatttgaggtcgggagtccaagaccagactggccaacatggcgaaatcccatctctaaaaaaaaaaaaaaaaaaaaaattagccacgcatggtggcaggcacctgtaatccccgctactcaggaggctggggcggaagaatcactagaacccgggaggcagaggttgcagtgagccaagatcacaccactgcattccagcctggatgacaaagcgagactccatctcaaaaaaaaggaaagaaaatgagcttcctcaatcttgccagaagcccttcacagctagtgcttttcaacccatttaccagatgaggaaactgaggctcaaagaggctaacagcctctcccaggtgaccaggagagcagggattccaattcacggccccaatgacacagagacagcactgtgtttcctcgacagcagagggtttttcagattcccagaagcagccactcatttgatgaacaaatgcttatgagcaggagctacatgctgagccctacgctgggcactggggctctgtgctgagcgaaacataaaagcccttgacccagggaagtggtgctcagaggaggaagacagtgaacaggaggggaggtcaggagccgaggagggcgagggaagacctcactgccagggaaagcaaagacctagaggcactgggagcgaggcaggtgtgtaactggaggaagagccttccaggtggaggtggcagcaagggcaaaggctctgaggccagagcgggccaggagtccaaagcagctggagctgagtgaggaggaggttggggggtgagaggacatgaggcagacagatggggaggagaacagtgaggaatggggatgggaaagaagcaggagggaaggcaggtgttgtggactttggctttatcctgagtaagatggacccatagaccccctgctcccctcccctcccttcccctccccttccctcccctcccctctccttccttccttccttcgtttttctacacaggcaggtgttgtggactttggctttatcctgagtaagatggagccatggactcctcccctcccctcccctcccctcgcctcctctcccctcccctcccctcctttcccctcccctcccctcctctcccctccccacctccctccttccttccttcatttttctagacaggcaggtattgtggactttggctttatcctgggtacgatggagccatggacttccttcccttccttctttccctccctccctccctccctccctcccttccttccttccttcctttctttgtttctctagacagggtctcactctgttgcccagtttggagtgcagtggcacaatcatagctcattgccacctcgaactcttcatctcaaatgatcctcccacctcagcctcccaatgagctgggactacaagtgtgcatcaccatgtgcagctaatttttgtattttttgtagagatggagtctcactatggtgcccaggctggtctccaactcctggcctcaagtgagcctcccacctcagcctcccaaagtgttggaattacaggcatgagccaccacacctgccctcttattttcttatcctgtatttaattatctggcataacaatttaaccaaagccctaaaaagtcacccaactagttttaaaaattgtgtctgggccgggctcggtggctcacgcctgtaatcccagcagtttgggaggccgaggcaggtggatcacaaggtcaggagatcgagaccttcctggctaacacggtgaaatcccgtctttactaaaaaacaaaaaattaaccaggcgtggtggcgggcgcctgtagtcccagctactcgggaggctgaggcaggagaatggcgtgaacccgggaggcgcagcttgcagtgagcagagatcgcgccactgcactccagcctgggcgacagagcaagactctgtctcaaaaaaaaaaaaaaattgtgtctgtttccccattagtttgtcattaactaagacattttctccccaaatttctttttttttttttttttgagacggagtcttgctcagttgcccaggctggagtgcagtggtgcgatctcggctcactgcaagctccgcctcccgggttcacgccattctcctgcctcagcctcccgagtagctgggactacaggcacctgccaccacgcctggttaatttttttttttgtatttttagtagagatggggtttcgccgtgttagccaggatggtctcgatctcctgacctcgtgatccgcccacctcggcttcccaaagtgctgagattacaggcatgagccaccgtgcccggcccccaaatttcttacaggaaatttctaaagtagactagagtccgcagtatttgagccctgcatacctctcacctgatttcaacaacatcagctgcagactgcccgacattgtctcctctatcccccttctctcatactttttcttctgggtattttgaagcacattctagatgccaagtcacttgcctgtaaatactggagcacacatttctctgagtgataagcacattgttttaaagcagtcaggaggttgtgcaatgtcatccatctcccagcagcagagttcacacatccacacgcaacctcctgctgctttatagatgaaggtgccaggtgaggacatgaaaagaatttgcattaaacatcaactgacaagcttttttttttctcctgccctctgtgccgttggcacaacccaccaaattcaatcaagttcttctatatcttccaatacccagtctgtgtcaaatgtctctgattatctgagaacatcgttttatgttgtttgttttattttaagagacagggtctcactctgttgcccaggctggagtgtaatggcacaatctcggctcattgcaacctctgcctcctgggttcaagctattctcctatctcatcctcctgagtagctgggattacaggcacccatcaccatgcccagctaatttttgtatttttgcatttttagtagatggggtttcaccatattggtcaggctggtcttgaactcctgacctcaggtgatccacccgtctcaacctcccaaagtgttgggattacaggcgtaagccactgcacccacccttgtttgttttgttttaagagacagggttttgctctgttgcccaggcaggaatgcagtggtgcgatcatagctcgctgaggcctccaactactgggctcaaacgatcctccaacctcagcctcccaaatagctaggactaacactaccactagtagtaactatgcttaactaatttttttatttttattttttgtagcgacggggtctca[131 bp omitted]ggtttcaccatgttggccaggctggtctcgaactcctgactcaggtgatcgccccctcggcctcccaaagtgctgggattataggcgtgagccaccacgcctcgcctgtctcaaaaataaattaattaaattaaatatttcaaaatacagaaaagttggaagacaatacagcgaacacctgaacacccaccacatattatagatgctgctagtcacactgccccaaacttttttaaaacttgcatttccccagtgatgcttccctgacggggtgtggcttcacgggctctgcccgacgggccgtcctccctctgtctccccagtacctggtgctcatgctcatcgtctacatcttcgagtgcgcctcctgcatcacgtcctacacccaccgtgactacgtgagcccggcgaggcctggggaggggcctgacctgcatgggaggggcgagggtcccggcgcggcggggcggaggtcgtcctctctccccacccagccctgccggcccttgttcttccctgttctcctcagatggtgtccaacccatccctgatcaccaagcagatgctgaccttctacagcgcggacaccgaccagggccaggagctgacccgcctctgggaccgcgtcatgattgaggtgggcggggtggaccgggtgctgggagggccctgggctccgtccacagaggccgatagagctcccgatgtgccagcttttagaggagtgagtgccttaaagacatccgctcatgagatctctaggagagcagggctgcggtcatcaccgttctgcggatgagtaaacaggcccagaaagggaaagtcccttgcccgaggccacacagtcggtaagtggtgggagctgggattggaacccggcagcctagctcctgacctccctgctcttagcctacacatactacctcaacagaaatgttgataataacaatgatagtaacagcaccattcactgagctaggtttcacactgttcaaaggacttttatttttatattttgagatggggtcttgctctgttgcccaggctggagtgatcatagctcactgcaacctccaactcctgggctcaagtgatcctcccgcctcagcttcccgagtagctgggaatacaggtgcgccccaccacacccggctaagttttttaaattatcttttgtggagatgggggtcttgctctattgcccaggctggtctggaactcctgggctcaggattggagcgattctcccacctccgcctctcaaagtgccgagatcacaggcatgagccacgagtgcctggcctcaaagcacatttttttttttctttttatctttttttttttttttttttttttgagacagagtcttgctctgtcgcccaggctggaatgcagtggcgcgatctcggctcactgcaagctccgcctcccgggttcacgctattctcctgcctcagcctcccgaatagctgggactacaggcgcctgccaccgcgcccagctgattttttgtatttttagtagagatgggtgttagccaggatggtcttgatctcctgaccttgtgatccacctgcctcggcctcccaaagtgctgggattacaggcttgagccaccgtgcccagcctttcaaagcacttttaaagcttttttaatcctcacgaccactccataagggagatcggccttttagtgatgaggagaccaaagcaagaggttgaatatcttgcatgaggtcacacacctggtaggtcacagaactggaaggattcaaactcagacttccaggtttgaagagatacagtcttcctcaaatccaacatgatattgcactggaaaaggaagaaattggctgggtgcagtggctcaaacctataatcccaacactttgggaggcaaaggcgggcagatcacttgagttcaggggttcaagaccatcctggccaacatggtgaaaccctgtctctacaaaaaatacaaaaattagtcaggtgtagtagtgtgcgcctgtgattccagctacttgggaggctgaggcaggagaatcacttgaacccaggagggggaggttgcagtgagccaagatggcgccactgtactccagcctggacaacagagggagactccgtctcaaaaaaaaaaaaaaaaaagaagaagaaattgaggactcaaggaaaactgaggcgtcaatgtggcccaagtcctctagctagccaggatttgaacccatgtttgaagggtgcccaagcctatgttttcctcattcaggagccacaaattaaacacctggattccttaccaaggccaggaaaagccagaaatctgccctttttgtgttattttatcagcatagttgttgataaaaatattttattttattttattttttgagatggagtttcattcttgattcccaggctggagtgcagtggcacgatcttggctcactgcagtcgccacctcccggattcaagcaattctcctgccccagcctctcaagtagctgggattacaggcgcccaccaccacacccggcaaattttgtatttttagtagagacggggtttcatcatgttggtcaggctggtctcgaactcctgacctcaggtgatccatccacctcggcctcccagagagctgggattacaggcgtgagacaccgtgcccggcaaaaatattttaaaataagtcagaggtgcaggtttaatccaaatcccccatcagcctcctggtcctgggacaaatattgtctgcaccgtgctcacacacacagacacccaccggacacactcgcttggaggcccaggacatggggaagttgggcccagctgtgtcaaaggccaatcctgcccctccttgctgtgtgacctcaggcaagcaactgtcctctctgagcccgagcctgcctgaccccctgcttttcactctagcaagaatgctgtggcacatctggtcccatggactgggtgaacttcacgtcagccttccgggcggccactccggaggtggtgttcccctggcccccactgtgctgtcgccggacgggaaacttcatccccctcaacgaggagggctgccgcctggggcacatggactacctgttcaccaaggtgtggccgtctgccctgctccatctgtctatccatctgtctgtcttcctctggtctctgctccctctctgattctctctttctccctccctgtgtctgtccgtctagctttttccctctcctcttcccctctctgattttcttgttttctttttctttctttctttctttctttcttttttttttttcaagaccgagtcctgctctgtcacccaggctggagtacagtggcacaatctcagctcactgcagcgtctgcctcccgggttcaagggattctcccacctcagcttccagagcagctgggattacaggtgcgcaccaccctcttggctagtttttgtatttttagcagagacggggtttgaccatgttgtccaggctggtctcgaactcctgagctcaagtgatccacccacctcagcctcccaaagtgctcagattacaggcgtgagccaccacgctgggtcccctctctgattttctagtgctcccccaactctctctcaagtcagcaggatgcacccagggtctgtctgaaccagacctggcacctacaactttactcaggttgtccgagaataagagcaataatagggccgggcgcgatggctcatgcctgtaatctcagcactttgggaggctgaggagggcagatcacttgaggtcaagagttcgagaccagcctgaccaacatggcgaaaccccatctctactaaaaatgcaaaaattagcccagagcagtagcacgtgcctgtaatcccagctactcgggaggctgaggtaggagaatcacttgaactctggaggtgaaggttgcagtgagccgagattgtgccactgcaccccagcctgggcgacagagtgaaactccatctcaaacaaaaaaaaacaaaacaaaacatcaaacaaaacaatagagctaggcacgggggctcacgactgtaatcccagtactttgggaggccaaggcaggagcatcacttgaggtcagaagctcaagaccagcctgggcaacatatcaagaccccgtctctacaaaaaagtacagaaaattagccaggcgtggtggtgcgcgcctgtaatcccagctactggggaggctaaggcaggaggattgtttgagtctaggaggtcaaggctgcagagagctgtgatggtgccactgcactctagcctaggcaagagacttaaaaaaggcaagagactttaaaaaaaaaaaggccgggcgcgcacagtggctcatgcctgtaatcccagcactttgggagaccgagatgggaggatcacaagatcaggagttcgagaccagcctgaccaacatggtgaaaccccgtctctactaaaaatacaaaaattagccgggcgtagtggtgcacacctgtaatcccagctactcaggaggctgaggcaggagaattgcttgaacgcgggaggtaaaggtttcagtgagccgagatcatgccactgcactgtagcctgggtgacagagggagactgcgagactgtctccaaaaaaaaaaaaaagccagctgtaagatcaaaatcaccctcagattgtcatagccatcagcagggcggcacctacttgtgcagggcctgggttcaacatcagctccctggggccccgaaaccacccgaggaggtggacagtgccatggtccccattgcacaagtgagaaaaccaatgctcagggaaggtggtgactttcccaagggcgcacagtgactctcgctttcagcggctaccctcatgggcgtcttctcaaacttcccccatccccctgcccagggctgcttcgaacacatcggccacgccatcgacagctacacgtggggtatctcgtggtttgggtttgccatcctgatgtggacggtgagaggcggggagcccacaggctgggtgggctgggggtggggggcggagtgccctcatctcgctgcctcctcgccagctcccggtcatgctgatagccatgtatttctacaccatgctctgagggacaggaggggaaggcaacatacacaccccggactcctccgcatcctcctcctgcttcctccgctgggcctggatggctgcctcacctctcacctcccaacgtccctagcccttacgtccttccacttccaagatctttttccaggttcctgagccctactgtgtctcaggtgtgccctgaaaccccagggcttgtgtgcacatatccttagcccatctttcaagggacctctccatgatcccacctcccattcacagatacctctcttgtagctctctgacctcctccttcatggcaggcatcgccattcttgctgaaccgtttgtgattgccatttgagctctggaagcctctattgccatgagagttctgtcacggtcactttactgtccccatcatcacccagcacggggctaagcatatactagatagtcaataaataaataaataatgaatgaatgaatgagtttttt[136 bp omitted]aatggtgagacccccatctctacaaaaatgcaaaaatcagccgggtatggtggcgcacatctgtaatcccagccactccggaggctgaggcagaagaatcacttgaacccgggaggtggaggttgcagtgagctgagatcgcaccattgtactccagcctcggcaacaaatcgaggccctgtctccaaaaacaaaaaaaactattctgatggaagtggtggaaacccaactgtcactgactgaagtgtaaaatggaatttatcagctcacgtaactgagtcaacggggctggcttcaggcatgtctggatccagatgttcaatctaagtttccaggaaacctgcttcattccctgacaggatttctctggcaactccagacttaatgtctttataactaagcaatgcaacagaaggaaagagcctctctcccaagggctgtagccaaggtccagagttgtagccaaggtccagagttgaatctcactgtctcggcttaggttctaggcccttcgttaggttgggaaagggagggcacctggcttggtaatcctgctaaggatgcatgcagtggtggtgttggaaggggagttgtttatcaaaggaaaatccagatacagggctgctgaggcttataggtgataaaaatccttctcctagggatatagcttccagcaagttctctaaggggtccatgacagcaaaccattacgaattgaattatggctgggcactgtggctcacacctgtaatcccagcacttgctgaggtgggcagatcacttgaggccaggaacttgagaccagcctggccaaaatggcgaaaccctatctctattaaaaatacaaaaaagtacctgggcatggtggtgtgcacctgtagacccagctactcaggaggctgaagcacaagaatcgcttgaacccggaaggtggaggttgcagtgagccaagattgcaccactgcactccagcctgggagacagaacaagattccgtctctaaaaaaaaaaaaaagaaccaaattatcactctttgttctccctgaagccacgactaggccttcccaagagggcctgggggcttccttccccatcaaataatttcttggggttcccatttactccagtggtctgcagatagtctttgattgctgaattcagatttcattttttaaaaatatgtaatggataaagaggtcattatttattagagtgaaaaatcggaaactacccaacaaccatcaccaaagggatgggttgtgtaaatcatgttatgcccttggactgaaatgctctgtggctgttgtgtgtgcgcctgtggtcccagctactgggaaggcttaggcgggaggaccgcttgagccctggagttcgaggttgcagtaagctatgttcacacctatgagtagccactgcactccagcctgggcgacacagcaaaattccatctctaaataataataataataggctgagcacggtggctcatgtctgtaatcccagcactttgggatgtccaggtgggaggatcgcttgagccccagagtttaagatcagcctgggcaacatagc[131 bp omitted]ccctgtctctacaaaaaatgcaaaaattatccaggtgtggtgatgcgtgcctgtggtcccagacactggggaggctgagatggaaggatggcttgagcccaggaggcagaggttgcagtgagccgagatcgcaccactgcactccagcctgggtgatagagccagactctgtctcaaaaaaaaaaaaaattaaaaaaattatctgggtgtagtagtgtgtgcctgtggtcctagcttcttaggaggctgagatggaaggactgtctgagcacaggaggtcgaggctgcagtgctccacaccaccacactccagcctggggaacagagcaagaacctgcttcaaataaataaatatatatatatataattataataataaatactttttaaaagagatagctgtatgtgagttgactataaaaagatctcataataactggaaagcccatatgaggatgttcattagtaaaataaatgactatcagcagggcactgggtaaattagctacgctatatccatcctctgcaataccacaaagaggtaaaaataaaaagaacaagaactctgctttaacatggaaaacgcgctaagaaatacatagtaggaaaaattgaaaactatatacagtactttttttttttttgagatggagtttcactcttttgcccaggctagagtgaagtggtgcgatcttggctcactgcaacctctgccccctgtgttcaagcgattctcttgcctcaggctctgagtagctaagattataggcacctgccaccatgcccggctaatttttgtatttttactggagacaggcttcgccatgttggccaggctggtctggaactcccgacctcaggtgatccactcacctcagtctcccaaaatgctaggattacaggtgtgagccatcacacctggcccatatagtactcttattcctgcagggttgatcaaacggagctttagtctttttcttccttaaaaaaatgagttaatgtttttataataatgtttagaagaatagaggaaaaactttgttgttttgcagaacacttttttgttgttgttgttgttgacggagtctcgctctgttgaccaggctgaagttcagtggcacaatcccggctcactgcaacctccgcctcctgggctcaagcaatcctcccctctcagcctcctgagtagctgggactacaggcacgcaccatcacgccccgctaatttttttttttttttttttttttttttgagatggagtctcattctgtcgcccaggctggagtgcagtggcgcaatcttggctcactgcaagctccgcctcccaggttcacgtcattcttccgcctcagcctcccacgtagctgggactacaggtgcccgccaccacacccagataattttttgtatttttagtagagacggggtttcactgtgttagccaggatggtctcgatctcctgacctcatgatccgcccgtcttggcctcccaaagtactgggattataggcgtgagccaccgcgcccggcctgtattttttataaaaatacaaaaaccgttctgcgcctggtagaacacttctttattacagcaatatataaaacaaatataactttaagccgggtgtggtggctcacacctgtaatctcagcactttgggaggccaaaacaggtggatcacctgaggtcaggagtttaagaccagcctgggcaacatggtgaaaccccgtctctactaaaaatacaaaaaattagccaggcatggtggcgggtgcctgaaatcccagctactcaggagactgaggcacaagaatcgctggaacctgggaggggaggtcgcagtgagctgagatcataccactgtactccagcttgggtgacaaagtgagactccatctcaaaaacaaatatatatatatatatatatatataaatttatattatatataaacttaatataactttaaatattcataatgacactatacattatgattgatggtgttagtccactctctcaaatttgagagaatagcttgtagaattcttgaaattcaccaaccttcttcataaagacacaggattgaaatgcatgtgcatgtttttgttaagagcataccaatttcattctcctcagttttgctcataatctccgtattttcatgcaccctcagtgagttagccaaactcaaggccttttattacggaaagggctagcacagttgtggtgacacccttaaaagttaatatccttaaaagttaataactaataagtcaacaacagatttttgacctagctcccttttcctttagagcaaaaagaactttcacctgagcatccagcccaac[140 bp omitted]gtgaaaccccatctctactaaaaatacaaacattagctgggcgtggtggcgggcacctgtaatcccagctacttgggagactgaggcaggagaatcgcttgaacctgggaggaggtggcagtgagccgagattgagccattacactccagcctgggcaacaagagtgaaactccgtctcaaaaaaaaaaagaaaaaaaaaaaacagaactggcagcggggaagggctggaggcagtgtcatcagaggaagatttttggattccaagcacagatgatgatttgtctgtggtcagtttgttttgttcttttcctttctttcttttttttttttttttaagacagagtctcgctgtcacccaggctggagtgcagtggcgtgattttggctcactgcaacctccacctcccaggttcaagcgattctcctgcctcagcctcccaaatagctgggatttacaggtgccccccgacatgcctggcttttttttttttctctgagacagagtttcgctcttgttgcccaggctggagtgcaatggcgagatcttggctcaccacaacctctgtctcccaggttcaagtgattctcctgcctcagcctcccgagtagctgggattacaggcatgcaccaccatgcctggctaattttgtatttttagtatagacaggttttctccatgttggtcaggctggtcttgaactcctgacctcaggggatccacccgccttggcctcccaaagtgctgggattacaggcattagccaccgcacccagcccctggctaatttttgtatttttagtagagatgagttttcgccgtgttggccaggctggtctcaaattcctgacctcaagtgatccacccgcgtcggcctcccagagtgctgggattatgccttctgttgatgatgtcaatcactttttgcggttggtcgtctccttgatctgaataatctgaatccatatcttcgtattctgcccaaaatgcctccactggaagccataaactgggcccaagtccccttcttctcagtggagaatcccaagttgtccaaaaagggctccactgcctcatctcacattttcactctcttggaagacagttcttcagcatatgtggatcccttgataaacgacagcaactcctccaaaacattgtggttgtcagcagaggaaagtcacttctcaggctgcagtgggactgactgactgcctgcctgccgaaaacgaaaacagcggcggcagagagcaggtgccctgggggcgtccttcctgcagctgcagcagacgatgtgctccacctgccttaggtactgcagctccccgtggggcggacagggctcagcatcccgctcctgcgcggcaggacagaggcagtgaggagacagggttagagaccgggtttcaccatgttggccaggctggtctcgaactcctgaccttgtgatctgcccgccttggcctaccaaagtgctgagattacaggcatgagccaccacgcccagccccaaattcataaactttcttaaaacactatgagattttttgcaatttgttttagctcatccactatcgttagtgtattttatgtgtggctgaagacaattcttcttcttctaatgtggcccagggaagccaaaagattggacatcccctttgggaggccgaggcgggtggatcacgaggtcaggagttcgagaccaacctggctaacaaggtgaaatcctgtctctactaaaaatacaaaaaaattagccaaacgtgttggcgggcgcctgtagtcccagctactcgggaggctgaggcaggagaatggcatgaactagggaggcagagcttgcagtgagccaagatggcaccactgcactccagccttggtgacagagcgagactccatctcaaaaaaaaaaaaaaaaaaaaaaagattggacatccctgctttacaacttggtttcttcacctaatcatggattgtggttatctttccaactcagtgaatatgaattcattttacttttttatttttttgagatggagcttcgctcttgtcacccaggctggagtgcaatggcacaatcttggttcactgcaacctctgcctcgcaggttcaagcgattctcctccctcagcctcctgagtagctgggattacaggtgcacgccaccacgcccagctaatttttgtatttttagtagagacggagtttcaccatgttg[136 bp omitted]atattccagagtataaatgtgttacagatcatcatgatctgtttgttgttcagttaataaggcaaggagcaaaacattgtgctaaagtggtctcatttttataaaaattatatctacatatttcccattaagaactcctttgttttattttattttagttcagtttttttgagacaggatgtcctgtcacccaggctggggtgcagtgccacgatctcagctcactgcagccttgacctcccaggctcaggcagtcctcctacctcagcctcatgaggaactgggaccacaggcatctgccaccacgtccagctaaatttttttttattttttgtagacatgaggtctgtgttgcccaggctggtcttaaactcctgggctcaagcgatccttccacctcaggctcccaaagtgctgggattacaggcatgagccaccgcacctggccccatctattactttttcttttcttttcttttccttttctttccttttctcttcttttttttttttttttttttttgagacagggtctcactctgtggcccagactggagtgcagtggtgcgctctcggctcaccaccgcaacctccgtcccacaaggctcaagtgattctcctgcctcagcctcctgagtagctgggattacaggcgcataccactgcagcctggctaatttttgtatttgtagtagagacagggtttcaccatg[136 bp omitted]taaaatactgaacagtatatggctttacttttcaaactagaattcttatatttttaaatttaaatttttttaatttatttatttatttatttattattttgagatggagcctcgttctgttgcccaggccggagtgcaatggagcgatctcagctcactgcaaactccaccacccaggttcaagcgattctcccgcctcagcctcctgagtagctgggattacaggcgcccgccgtcatgcccgactaatttttgtatttttgtagaggcgaggtttcaccatgttggccagactggtcttaaactcctgaccacaggtggtctgccctccttggcctcccaaagtgctgagatttcaggtgtgagccactacagctggcctcaaaccagaatttttaaaacgccacttacatggaatatacacactggattttcccaaacaagagcccctccaggctgacttccctaaatggcttttcagcaggccccggaaagcttctcgccccaccctgggcacacattggaacagcttgtaaacatgtcaaggaaattggggattccatcctcatctgctcataaagtcaggtgtcctcagccaggcgcggtggctcaagcctgtaatctcagcactttgggaggctgaggtaggtggatcacttgaggtcaggagtttgagaccagcctggccaacatggtgaaaccccatttctactaaaaaatacaaaaattagccaggcgtggtggcgggcgcctgtaatcccagctacccaggaggctgaggcaggagaatcacttgaacctgggaggcagaggctgcagtgagccaagatcgcgccattgcactccagcctgggccacagaacgagactcttaatcaaaaaaaaaaagtcagatgtcctcaccagcaagtcgatggtgacttagttgatagtgattgggattctctgagagaagcagagacagcactgacttctcaaaaggcccaccacactgagcctcaatgtgcccctctataaaatgagagttgtaacagtccctatctcatagcatagggccctgttcttttttctttctttctttgtttttttgagacagtgtcacactctgttgcctaggctagactgcagtggtgcaatcacagcttactgcagcctcaacctcccagactcaagtgatcctcctgcgtcagcctcccaagtagctgaaaccataggcatgtggcaccacacctggctatttttttattatttgtagaagcaacagggtctcactatgttgccccagatggtcttaaactcctggcctcaaacggtctttctgcctcggcctcccaaagcactgggattgtaggcatgcaccaccacacccagcttcctattctaagagctcaggaaactgtggactttctaattatgaatcagggatattcttgatcctgtataatcagaaccaaatgcagaaataaacttcctgctgaggctgcaatcgtctctagtgaacctcaatgtcaagtgtttggggcactacccatcctcaacactcaccaaagggaccctcatatatgcatttataaaaataaagtccgggcgcggtggctcatgcctgtaatcccagcactttgggaggctaaggtgggcagatcacttgaggtcaggagatcgagaccagcctggccaacatggtgaaaccccatctctatcaaaaatataaaaaattaggccggtcacggtggctcacacctgtaatcccagcactttgggaggccgaggcgggcggatcacgaggtcaggagattgagaccatcttggctaacacagtgaaaccccgtctctactaaaaatacaaaaaaaaaaaattagctgggtgtggtggtgagtgcctgtacgtagtcccagctactcaggaggctgaggcgagagaatggcgtgaacccgggaggcggagcttgcagtgagcggagatcacgccaccgcactccagcctgggtgacagggcaagactccgtctcaaaaaaaaaaaaaaaaaaattagctaggtatggtggcgggcacctgtagtcccagctactcgggaggctaaggcaggagaattgcttgaacccaagaggtggaggttgcagtgatccaagatcgcaccactgcactccagcctgggcaacagatcaagactccatctcaaaaaaaaaaaaaaaagaaaaaaaaagtcacacttgaaaatgcttggtgcggccgggcatggtggctcatgcctgtaatcccagcactttgggaggccgaggcgggcggatcatgaggtcaggagttcgaaaccagcctaaccaacatggtgaaaccccgtctctactaaaaatacaaaaattagccaggcatggtggtgtgcgcctgtaatctcagctacttgggaggctgaggcaggagcatggcttgaacccgggaggcggaggttgtggtgagctgagattgtgccattgcactccagcctgggcaataagagcaaaactccatctcaaaaagaaaagaaaagaaaatgcttggtgcttttactgtgagatgatgagcccatgaactcagcatatgttagcgtgaatatgtttctggctgaggatctttaaagaatgtttgtggaggccgggtgcagtggctcatgcctctaatcccagcactttgggcagcccaggcgggtggatcacaaggtcaggagttcaaaaccagcctggccaatatggtgaaaccccgtccctactaaaaatacaaaaattagctggacgtggtagcatgtgcctgtagtcctagctgcacaggaggctgaggcaggagaatcccttgaatccaggaggtggaggttgcagtgagccaaaatcgtgccactgcactccaacctgggcaacagagcaagactacgtctcaaaaacaaaacaaaacaaaacaaaacaaaagaatgtttgtggagtttatgccaattgatatgcataaaatcagtttttttcctttattattattatttattttttgagatggagccttgcactgttgcccagactggagtgcagtagtgccatctcggctcactgcaacctccacctcccgggttcaagtgattctcctgccttagcctcccaagtagttgggattacaggcacccgccaccacgcccagctaagtttttgtatttttagtagagatggggtttcacta[140 bp omitted]gagtgcaatggcaggatcatggctcactgcagcctcaaccccccagactcaagcgatcctcctgcttcagcctgccaagtagctgggactacaggtgcataacactataactggctaatttttaaattttttgtagagacggaattttgctgtattgcccaggctgatctcaaactcctaaggctcaagtgattctcctacttcgacttctcaaagtgctgggattataggcatgagccat[136 bp omitted]catggtgaaaccccgtctatactaaaagtacaaaaaaattagccgggtgtagtggtgcacacctgtaatcccaactacccaggagctgaggcacgaaaatcccttgaacccgggaggcggaggttgcagtgagctgacatcattccactggactccagcctggccgacagagcgagactgtctcaaaaaaaaaaaaaaaaaaaaaaaccctgcaaaagaatttaatggcatgaaaaaaatgcttgggaaattgtgacatgagaaaaacagattacaatgtagcatgccaagtatgattccttccctgataaaaatataaatatgtgcatgtttgcattttttttaaaagaaagtcttccaaaggttattgaggaagaggacacatttgcaggggatctttacttcattccttggacattttggtattttgcaaatattttatgatgactattgcctttgtcctctaacaaaaaatcaagaaatatatcttagttaaaatgtccctgctggacataaaatgtacattgagaagagaattatcctactaaatattttcaaactttatctgagcagttaaggtgtccggaattggtgggttattggtctcactgacttcaagaatgaagccgcggaccctcgcggtgagtgttacagctcttaaggtggcgtgtttggagtttgttccttccgatgttcggatgtgtccggagtttcttccttctggtgggttcctggtctcgccggctcaggcaggagtgaagctgcagaccttcgcggtgagtgttactgctcatgaaggcagtatgcacccaaagagtgagcagcagcaggatttatagcaaagagcaaaagaacaaagctaccacagcacggaagggaaccccagcgggttgccgcggctgactcgggcaaccttcttttattctcttatctggccccacccacatcctgctgattggtccattttacagagagccgagtggtctgttttgacagggtgctgattggtgcgtttacaatccctgagctagacacaaaggttctccatgtccccactagattagctagatacagagtgtccacacaaaggttctccaagtccccaccagagtagctggatacagagtgtcgattggtgcattcacaaaccctgagctagacacaggatgctgattggtgtgtttacaaaccttgagctagatacagagtgccgattggtgtatttacaatccctgagctagacataaaggttctccacctccccaccagactcaggagcccagctggcttcacccagtggatcccgcactggggctgcaggtggagctgcctgccagtcccacgccgtgcgcccgcactcctcagcccttgggtggtcgatgggactaggtgccgtggagcaggggcggcgctcgtcggggaggctcaggccgcacaggagcccacggggtacggggagaggggaggctcaggcatggcggtctgcaggtcccaagccctgccccgcgggaaggcagctaaggcccggcgagaaattgagcacagcagctgctggcccaggtgctaagcccctcactgcccggggccggcggggccggccggccgctctgagcgcggggtccaccgggcccacgcccacccggaactcggcgctggcccgcaagcaccgcgcgcagccccggttcccgcctgcgcctctccctccacacctccccgcaagctgagggagccggctccggccttggccagcccagaaaggggcttccacagtgcagcagcgggctgaaggttcctcaagtgctgccaaagtgggagcccaggcaaaggaggcgccgagagcgagcgagggctgtgaggactgccagcacgctgtcacctctcagtaagacaggtcagggctgggcacagtggctcacgcctgtaatcccagcattttgggagctgaggcaggaggattgcttgaggccaggatttccagaccagcctggccaacatagtgagacctcatctctccaaaaaatttaaaaattagctggccatagtggtgcgcacttgtagtaaccgctagtcgggaggctgaggtgggaagatcgcttgaacccaggaggtaggggctgtagtgagctgtgatggtgccactgcattccagcctgggcaatagcaagaccccgtctcaataataataataataggccaggacttgctagatgggaggccggggtttgacctgacctctgacctctgggcagtcaggtaggtaggccgccatctctgacccacatctgccacttggctttcgggctccatcctaccatatacctgcagagtgtggctcagtcagaccggcagcagcgtggcctcacccaggcgggcctgcctgcaggacaggtttgtccgccccagcccccaaactcagaggccggctcctgtgggtaagaggggagcaaagaggtcagggctatgtcagggcccggaccccttgagggacaggcagccatttgatggctgttccccccacaccccaggtgactgcatccctcctcagcctctaaccctccacggctctccagcgccctcctcacctcgcactgagggcccgtgtggcttggccccttgccacctctccaggtatctctttctctctcttgctccactgagccaagctctctctctcaccatctgagatcacagaatggaaataagaaactgtgttatatagcaatcaagccaggcacatgcctctgactacatccacttttgcttacactccttccatgagggcaagttggttctttttttttttttttaactaaaacgtaaaaacacacacccctgccctttcctcaggtgtcccacgcccaccaattcctcctctctggtccccgcgtccttggctggtgttagaaaaatggctacaagcttcctgggaatcagataataaagcttacaggaactcttcccagatttaaaagagcttaataaataaataaataaagcttaccttctagaggggaaaatagataaaaccaataagaaaaacacatgttagaggctaataagtgctaaggagaaaaataaaagaatgaaagacaaaacaaaaacctagccgggcgggggggcgcggtggcttacgcctgtaatcccagcactttaggaggccaaggcgggaggaacgcttgaggagttcgagaccagcctaggctacatagtgagaccctgtctctacaaaacaataaaaaaatttttaaaaatcgctggccatggtggcaagcacctgcatcacagctgctcaggaagcttaggcaggaggatcacttgagtatggcagtcgtcgctgaagtgagccaagatggcaccactgactctgtcagcccagataacagtctcaaaaaaaaaaaaaaaaaaaagatgactgggcatggtggttcacacttgtaatcccagcactttgggaggctgaggcaggcagatcacctgaggtcaggagttcgagaccagcctggctaacatggcgaaaccctgtttctactaaaaatacaaaaattagctagatgtggtggcatgtgcctgtaatccaagctactcaggaggctgagatagaagaatcacttgaacctgggaggtggatgttgtagtgagccaagatcgtgccactgcactccagcctgggtggcagagcaagactccatctcaaaaaacaaaaacaaaacaaaacaaagcaaaaaacggtgagagggcctggtgccccctctggaatgtttttcattgtctaggtttgacactgtgctgtgccatcacgtgtggggctggggaaagtgcagattccggggcacacgcctgcccttggagcagggatggagtcagctccatctatagggtctggtctgggaggagggagagggtgcttgcccagagcaggctcagaccctaagcctgagcctagggaagggtgagccgaccctggaggcaaatggaccacaatcccccctccccatcaaccttcaccagcgattccgggataaatgacacagacagcactgagaattccatggtagtcgttattattactgttgtttttattaatagcaggggccccatcacttacctgtgggttatcaatttattacctctcagttccatttgtcatctggtgccaggttaggctttgtcaatagagggcgctggagagccactgaggagccagggcccctctgcctcactccagggctttgtgttcttcctactgcgctgtgaccagcaggtggctgctatgctccacattatagggagtgacctccactgccaccctctcctccttctccctcctcctcctccctcctcctccctcctccttctccctcctcctcttccttcctcctcctcctccctcttcctcttcctccctcctcttttctttcatccctcttcctttctcctccttcttccttctccttccttcaccctcctcctcttccctcctccttttttctctttctcctcctctttcctcctccgccttcttcctcctcctcctccttcttcctaccccttctcctcccccttcccctttcttttaaaagacggggtctcagccaggcacagtgactcacacctgtaatcccacctgtaatccctcactttgggaggccaagacaggaggatcacttgagcccaggagttcgaggctgcagtgagctatggtagcaccactggactccagcctgggcaatagggggagactttgtctgagagagagagagagagaaaatgagaatcgcaccgtgtcgcccaggctggagtacagtggcaggaccatagctctccagtgccttcttgagtctagctagggacttgtcacttaacccaacagatctatttaaaacatgaagtagaatcattgtttctcacagaatcagctgccttctcagatcctctacaaatggaaacagaatcatgcaaaacagggaaggtaaagggacaagaaaatggtctttttgaagagctgctcccagccctgctggacaaaatgaccaaaataggatccctggtattaaagttcctctcataaaaatccattcagaaaattgaggacactttgggaggctgagatgtgaggattgtttgaggccaggagcctgggcaacagaacaaggccctgtctcaaaaaaaaaaaaaagaaaagatacatatatatatatctgtacccagagtcaagacaagcaatatttgttgtctaaaaacaactctggttcagggtacatcagttaacttttttttttttttttttttgagatggagtctcgctctgtgtcccaggctggagtgcaatggtgcgatctcagctcactgcaagctccacctcctgggttcacgcaattctcctgcctcagcctcccaagtagctgggactacaggcacccgccaccac[134 bp omitted]acccagcctttttttttttgagacaagagtcttgctctgttgcccagtctggagtgcagtggtgcaatctcagcttactacaacctccacctcctgggctcaagtgattttctgcctcagcttcccaagtagctgggattacaggcgtgcgccaccacacctggctaatttttgtactttttgtagagacagggtttcaccatgatggacaggctggtctcgagctcctggcctcaagtgattctcccacctcagcctcccaaagtgctgggattataggtgtaagccaccacgcccagcccaagacagatactttaagaaagtaaactggccaggacagtggctcacacctgtaatcccagcactttgggaggccaaagcaggcaaatcacttgaggtcaggagtttgagagcagcctggccaacatggtgaaacccggccttcactaaaaatacaaaacttagataggcgtggtggcaggcacctctaaatccagctacttggaaggccaaaacagcatcatttgaacccaggagatggaggttgtagcgagccaagatcctgccactgcactgcagcctgggtgacaaaacagggctctgtctcaaaaataaaataaaataaagaaaaagaaaataaagaagggaacttaggttaagtgaggtcataagggtggggccctgatccctgatgtccttatagaaagagacaccaggagtgcacacacacggagggaaggccatatgaggtcacagtgaaaaggtggccttctacaaaccaaggacaaatgcctcaggacaaaccaaccctgctggcaccttgactttggacttccagtctccagaactgtgagaaataaatgtctgttgtttaagccccctagtctgtgatattttgttacacagccctagcagaccattacattcagtctcttctttgcttcccactgtgtcctttctaccaagcaccatgcctagcacatagtaagtacccccaaaaagatgcacaaacatcatcgcctcctgtgggaagctgtccctcacccttctccactccttctccccttagcttaagtgcctcttctcagcttcagttcctacactttccacttggctcttgaagaatatgttttgaggtctaattcctctctagcaggtgaaatgtttgaaggcaggggctgggtcttccccagggctcagcaccaatggcatgcaccatcagaattttttgttttgtttttttgagatggagtttcgctcttgtcacccaggctggagtgcagtgacccaatctcagctcactacaacctctgcctcctaggttcaagcgattcttgtgcctcagcctcctgagtagctgggattacaggcgcccgccaccatgcccggctaatttttgtatttttagtagagatggggttttgccatgctggccaggctggcctccaactcctgacctcaagtgattagccaaccttggcctcccaaagtgctgggattacaggtgtgagccactgcgcctggccaggagtttaataaatatttgagtgaaagtaagtttcttgaccttgacgcatgggccctagagagctagaagacctgaattctaagcttcattcctgtgcaactgtggacactgagcctcaaatgtaatcatggtctggggtttttccagagatcaaagcttggggaaagtcctttgttctctgaaaggtacagggttattttcacatctgttatgaacactcgtgccgttgagctgagctcctgagtcttagtcagctgcctggctccaggtggacttcctgctgtacctcagatatactaagctcactcctgccttggggcttttgcgcttgctactgcttctgggaacacactgcccccaggctttcccatgatcccttaattttcagggtctacaccacagccaaggcagatgacactgattgcaaggaaacaactcggttacagggcattggggaacagaagaaatgccactattcggctcacgcctgtaatcccagcactttaggaggccgaggtaggtggatcacaaggtcaaaagatcgagaccatcctggccaacatggcgaaaacccgtctctactaaatatacaaaaattagctgggcgtggtggcccgcgcctgtagtcccagctactcaggaggctgaggcaggaaaatcgcttgaacccaggaggcagaggttgcagtgagccgagatcgcgccactgcactccagcctggagggcagactccatctcaaaaaaaaaaagaagaagaaataccactgctctattagttcatttaatcccctcaatgactttgagaggtacacactttttttctttttttttgagacaggttctcactctgtcacccaagctggagtgcagtgttgcaatcatggctcactgtagcttctacctcctgggctcaggtgatcctcttacctcagcctccccagtagttgggattacaagtgtgtgccaccacacctggctaatttttgtattttttgtagccatggggattcgccatgttgcacaacctggtcttgaactcctgagtccaagcaatcctctcacctcagcctcccaaagtgctgggattacacatgtgagctaccacgaccgggagtatgtaccttttttttttttttgagatgacgtctcgctccgtcacccaggctggagtgcagtggtgcaatctcagttcactgcaacctccccctcccaggttcaagcgatcctcctgcctcagcctcccgagtagctgggattacaggtgcctgccaccacacccagctaatttttgtatttttagtagagatggggtttcaccgtgttggccaggctggtcttgaactcttgacctcaggtgatctgcctgcctcgttctcccaaagcgctgggattacaggcatgagccactgcactcagccactcagcccttttttttttttttttttttttttgagacatagtctcactctgttgccctggctggagtgcagtggcatgatctcagctcactgcaacctctgccacctgggttcaagcgattctcacgcctcagcctcccgagtagctgggattacaggcttgtatttttagtagagacagggattcaccatgtcggccaagctggtctcgaactcctgacctcaggtgatccgcccacctcggcttcccaaagtgctggaattacaggtgtgagccaccatgcctggccaatatgtactattaatatgcccatttatgatatgaccatttaatatgcccagatgaagagattaaggcccagaggggttaagcaatttgccaaaggtctcacaactagtaaataacagggccaggatatgatgcagacagtttggatccagcattcagctacctaggctgcaaggctctctgcttctcagtgtacagttaagcttagttagtgtaggatctggcatggggagttgctcaataagcaactgaaggcaggggctttttatttatttttctacttctttcagacatttaactctccaaatcttacagtccaaccccccaagccaagccaacaacccttcctataccatcttgccagagcccagggtccctcactccatcttctcatgccttcctggcccataaaaaggattcaataatttgtagtaattagctgggcatgttggcatgtgcctgtagtcccagctcctcagaaggctgaggcaggaggatcgccgaggctaggagtttgaggccacagtgtgctacgatcgcacctgtgaatagccactgcactccagcctgggcaacacagcaagaccccatctctaaaaaaacaaaacacaggaaacctgtattgtagaccagcttattaaaacagaaagaaaataaccaggtgtggtggcacatgcctgtaatcccagctactcgggaggctgagacaggagaatcgcttgaacctgtgaggcagaggttgcagtgagccgagatcgtgccattgcactctagcctgggcaacagagtaagactctgtctcaaaaaaaaaaaaaaggaaaaaatatgaataataaaaaattgtagcaattatcactagggcttctcagtgagaatcagtgagaaactccaaaggttctgaggctgtaaagtatattcccaaccacctttagggtcaaagttgggacaagatgaactaactgtaaataaggcttgttgagtgagaggacttctcaaccaatccaacccaggatctaccagacaagcacttcctgaaggtaatgtggttcaggggtgatctcctgggtcaggcagatctgggtctgaattccagcttcggttactcctcagggagtaaccgaagctggatccgcccgccttggcctcccaaagtgctgggattacaggtgtgagccatcaagcacccagccggttttttttttttttttttttttgagatggagtcttgctgtgtctcccaggctggagtgcagtggcgcaatctcagttcactgcaacctctgcctcccgggttcaagcgattctcctacctcagcctcctgagtagctgggattataggcatgcgccaccatgcccagataacttttgtatttttggtaaagatggggtttcaccacgttggtcaggctggtctcgaactcctgaccttatgacccacccgccttggcctcccaaagtgattggattacaggcgtgagccatcatgcccggcctcgtttcttcatctttcaaataggaaaaacacagtgtgaggtgtgatgaagaactcaggcttggattcaggtcttgcatcattctactccttgctcagccatggactagctgtgtgagctgagatgaggagcttcacctctgtgagccttggctgcctattccaatgcgtgttggcgtcattctgtttcctatagtggctggggattccctgggaccatgtgtgtctgcactgtggtcactgtagttggcaggatggaggcagtgtataaaaatgtttaggagcttaggctctggagtcagactgcaacaggcctagttcaaattccagctctgacaattactcccagtgagatcttaggaaaatcagtttcttctctgaacctgtttttgtttttttgttttgttttgtttgagacggagtcttgctctgttgcccaggcttgagtgcagtggcgcgatctcggctcactgcaacctctgccaggttcaagtgattctcctgcctcagcctccccagtagctgggatcacaggcatgtgccaccatgcccagctaattttttttgtatttttagtagagacagggtttcaccatgttggccaggctggtctcgaactcctggcctcaaaggatccacccgcctcatcctcccaaagtgctgggattacaggcatgagccactgtgccaggccaaacctcagtttttgtatctgtcaaatgagaataataacagtaaatatccgatagagtttactatgaagagtcaatctgatgatgtaggtaaagcacttaaaactggtctggggcctggcacagtggctcgtgcctgtaatcccagtactttgggagtccaaagcaggaggatcccttgagcccaggagtttaagtccagcctgagcaacatagtgagaccatctctacaaaataataataataaataataaattaattaattagtgatgcatggtgttgtgcacctgtagtcccagcgacttgggaggctaatgtgggaggatcctttgaccccaggaggtcaaggctgcagtgagccatgatcctgccactgtgctctagcctgggcaagagagcaagaccctatctcaaaaaaaaaaaaaaaagcaaagatattatgagactgattttttaaatacctttctctaggccaggtgcagtagctcacgcctgtaatcccagcactatgtgaggccgaggcaggaggatcacttgaagtcaggagttcgagaccagcctggccaacatggtgaaaccccgtctctactaaaaatacaaaaattagccgggcatggtggcaggtggctgtaatcccagctactcgggaggctgagacaggaggatggcttgaaccccgggaggtggagattgcagagagctgagatcgcacaactgcactccagcctgggcgacagagcaagactctgtctcaaaaataaataaataaataaataaataaataaaatacctttttgtacatgtcagtccattttcccaaaaccagggccaatgtgatcagaccccatccccatctacaaaatcaatcctacttaatcatagtgtagcttgaaggttgggctctcaccacagcagggttcgagttccagcaatgcccgtaactgctgcgggaccctaaataaacgacttcacctctttgaccctcagaggttaacctggcatagtaatcgcctccctcacggggttatttaggtttcaacgagttgatgcacaagcgtggcacatggaaagggctcggtaaacacgaggtgctattactcccaccacagtgccagtccttctcccttttttactttattttttatttttattttttgagatggagtcttgctctgtcgcccaggctggagcgtagtggcgccatctccgctcactgtaacttccgcctctcgggttcaagcaattcacctgcctgggcctcccgagtagctggggttacaggcatcccccaccacgcccggctaatttttgtatttttagtagagacggggtttcaccat[138 bp omitted]gggacgcctcaggctgtctcggtcaggacctacagctccggttgttgtcccaggctcttccgcgaggtgctctcctgtctcctgaccacccccattcctccccactccagctcctcagcgagcggctgcgaaggacgcgcacaacaacactccgcgcagcgggaaggtaccgaactcgcatcgcagcctgaaactgctcaactaagctcccgccccgctgctctctggtcaatctaaagcgaagacgagccttagggccaatcagaagcgacagcggtggagtcatgcccgcctgcttgaggcgccctggcgtctcattggctatgcttgagaacgaatcccaggctaagccacttagaaaggagcggagccagccaatcagcggtgcaaccgccgcgggggccgggccagaagccccgcagacaagcacctcgggagactggcgaggggcgagctcgcagcttgttagccccgaagccctgcccagggggaaaccctgctggagggagtctaacccccgggccagttaatgttggggcagcgcaatcggccgttccctctgcggtatggttggaggtgggagtgctgacacgtccgcgcgcagttactcctggctgagcatacagtcgaggtggcagtgggaattggaagtgcaagtgtcacgctgccaatcacggggcaaggcactgcccccctcttgtgtctttcctgtccctgtacacttccaggcttccaggcgaggcagagtgagctgtgccagcaatcgtggtggagtgggacaagagagaaaagggagctgttcacaggcaccgaagcctggctggctctttttttttttgagacgccgtctcgctctgtctcccaggctggagtgcagtggcgcgatataggctccctgcaatctccgcctcccggggttcaagcgattcccctgcctcagcctgccgagtagctggaattacaggcgcccgccaccacgctcagctaatttttgtatttttagtagagacggggtttcaccatgttggtcatgctgatctcgaactcctgaccccaggtgatccgccctcctcggcctcccaaagtgctgggttttcaggcgtgagccaccgtgccctgcctggctggctcttttattttatttttatttatttattagagacagggcctcactgtgtcgcccaggctgcagtgcagtggtgtgatcatagctcactgcagcctcgacctcctgggctcaagcgatcctactaccacctggacctctcaaagccctgggattacgggcatgagccaccgtgcctggccttggcttgctcttacgggcctcccagccaatcaggtgtggcggcagcctacacaccccctacacacctcacagatggtaaagggttgagagaaaggtgacagggtttgcaaatgggagctacttagggtggcaaaatagaagcaagaaaggcaggtcaggcacggtgtctcacggctgtagttccagaattttgggaggcccaggtggaaggattgcttgagcccaggagttcgaggctgcagtgagctatgattgcaccattgcaccccagcaccggcaacagagggagac[137 bp omitted]tggtgaaaccccatctctactaaatgtacaaaaaattagccgggcgtgatggcgggcgcctgtagtcccagctacttgggaggctaaggcaggagaatggtgtgagcccgggagtcggagcttgcagtgagcagagatcgcgccactgcactccagcctgggcgacagagcgagactctgtctcaaaaaaaaaaaaaaaaaaaaggacagtagtactcctgagcacttgctgagggagcctccagggctgttcaggtgaaggagaatcagggtccagtctcttcgtggagagagtgggaaaaggcagactccacagcagatcaacgctggggcccggctggaaatcaatgaaatctcagcctaagaggcctgaagcctatggaccaatgagactcaaggctctgccccttcacagccaatcagctgcgggtccgaggcagacgcgcgggagtggcgctgtcctaggtgcctcccaggctgcccagcgtgctcagctggcctgagcgggagaatgcggcccgcgctgcagccaatcagcgtccgcctcaggatccaggggtgaccacgtgcgggagcgttgcgtccctggcctcgctccattccccacttttaacggtcactcggccttaagccgtcctgggtgtatgtgaggctgaaagggaaggaggaacagggtctgggccggtgagtgccatagtttttcttactttactttcttgggcttgggcccggcccaggcaaatctggggtatgggggcttgactggacctcgttgatgattgggaagtgcgggttgagggctttagcccttggggctttcctctgcctttgagaggctggaaatgcagcctcctggccacctttaggcctaggtttggcagaggctaagccagcttgctctctgagttggtccacggcccccgaggccagcctgagtaggaagggtgttgtggggaagttggaggtccttaactctgcatgaggtatggcctccggacaatgagagcttatcaagggtctctggactgagcctggatccgg[144 bp omitted]gagaaaccctgtctctacggggtttctaaaaaaaattacctgggcgtggtggcacacgtccgtaatcccagctactcagaaagctgaggcaggagaatcgcttgaactcattgaactcaggagatgaacgttgcagtgagctgagatcacgccattgcactccagcctgggcgacagaatgagaccctgtctcaagaaaaaaaatgaaaagaaaaaaaaagttatgtaggaagtcactggccaagagatgaaactagtgtgcacatgaaggtttcctggggtctttggagccagcctgggctgggagtgaatgttctggactccaggttgagatgttcttggcagatttcccagtatggagtccaggttggatgatgtggccaagaggttaggccagtaatcctctggagattctagggagaaggattctgaatcccagccgagctgtttgcgctggatgaagtattattgccttgtggtggctctgtacagaactgggattgggtggccaggcgtggtggctcacacctgtaatcccagcactttgggaggctgaggtgggtggatcaccaggtcaggagctcgagaccagcctgaccaacatggtgaaaccctgtctctactaaaaatacaaaaattagccaggtgtggtggcaggtgcctgtaatcccagctactcaggagtctgaggcaggagaatcccttgaacccacgaggcggaggttgcagtgagcagagatcgcaccactgcactccagcctgggcaacagagcaatgctctgtctcaaaaaaaaaaaattaattaaaaaaaaaaaaaagcagggccaggcgtgggggctcacatctataatcccagcactttgagaggccaaggcgggcggattacctgaggtcagaagtttgagaccagcatgaccaacatggagaaaccccatctctactaaaaatacaaaattagctgggcgtggtggcacatgcctgtaatcccagctactagggaggctgaggcaggagaatcgcttgtacctgggaggcggaggttgcggtgagccgagatcgtgccattgcactccagcctgggcaacaagagcgaaactccatctcaaaaaaaaaaaaaaaactggaattgggtcatgtctggagcttttcattctccctgtcccactctttcccatgcctgttctgataattcctagaagatgaagatatcaggctgtaggtgcggggcaggtgcatggggaggatgaacatcgtagtggagcacaggaagaggtgtgtgagatattctcctctttaggaaatcacccaggtttttggcagggcgtggtggctcacacctgtaatcctagcactttgggaggccgaggcaggtggatcacctgaggtcaggagttcaagaccagcctggccaacgtggtgaaaccccatctctactaaaaatgcaaaaaattagccgggcatggtagatgcctgtaatcccagctacttaggagcctgaggtaggagaatcacttgaacccaggaggcagaggttgcagtgagccgagatcgcgccactgcactccagcctgggcaacaagggcaaaactctgtctcaaaaataaataagtaaataacataaaggaaatcacccaggttgtctttactgatgatcttttttatactcatggggcagggtgttgatacctagtttcattcagctgttcagtggtatttatgctttcggagtgccttcagtacacccagagttctttaaccaggggtgagggtgcaaggagtggcttatgagtggacttcaaggaagtctaaccccgaaaccagttaatattggggcagctcaattggccattccctctatggtgtggtgggggcccggggtgctggcacatgaagtgtgcagttaatcccagctcggcagacagccaccaagcatgatggcacatgcctgtaatcccagctactcaggaggctgagatagggggatgacttgagcccaggatgtcaagactgcagtgagccatgattgtgccactgcactccaggctgggtgacagagcaagactgtgtctctaaaaaaaaaaaaaaaaaaaaagaacaattaatggtatgcatgtatattatgaggaggggagggtaaagaataagctagacgatagttaacctctccagccatgaggctcagagtaatctgtcaatctcttgtcatgcattcatatgccaagtggtataagtgtctaccattttctttttttttttttttttcgagatggagtcttagctctgttaccaggctggagtgcagtggtgtgatcttggctcactgcaacctccgcctcccgggtttaagcaattctcctgcctcagcctcccaagtagctgggattacaggcacgtgccaccacgcccagctaatttttgtatttttagtagagacggcatttcacca[139 bp omitted]ggtggctcacacttgtaatccctgcactctgggaggctgaggcgggtggatcacttgaggtcagaagtttgagaccagcctggccaacatggtaaaacctcatctctactaaaaatacaaaaattagccgggtgtcgtggtgcgtgcctgtagtcccagctactcaggaggctgaggcaggagaatctcttgaacctgggaggcagaggttgcactgagccaagatcgtgccactgcactccagtctgggtgacagaaggagactctgtctcaataaaaagaagagttagtcccatgggtgacattctgaacctgatggtgactccctaagagatttagaaccattggaataaagtaggttcctatattatttatggggcctgggcaagatgacagagactccctcgtctcttcccatgcctggtgttggcccatacttcaaggtgtctcacattctagcctgcacatccaagctcagtctacaaatcccttacacaaaatcagggtctagcgtgtgtgtacatcagtcagagtccactctcatgaatacaggcctggggttgagtcctgtgtagggggcctcagagtcatttggtccaggaaatccagggtgctgagttctcagagcatggtccagaagtgaggtgggagctcacagttccgggtaggcactttctagatgccttttgactcagcctatgcgaagggatacagccagaggaggtccaaatgggaccctttgcccaggtttaagtcaacactagtattctgtactggtcttgaaacagcccctgtgaggaaattgagggtcttggaagacttagctccatatgagtgctgaagagaagggccattcactgtgaagggatgcagtgaaacctgttttccaacttctagtctagttctttttccagttaatccacaaagtgtgtgctatgaaggggctagattcagctcacctgggtatgactatagctggttcttggatcatatagagcacaaatttaagggaaaaagggaactaattcactccttgtggtgactcttttctggaagtcttggatgtacttaaccagaaagacggaacatcttttttttcttttttcttttttctttttttttttttgagacagagtttcgctcttgttgctcaggctagagtgcaatggcgcgatctcggctcaccgcaacctccacctcccgggttgaagcgattctcctgcctcagcctctcgagtagctggaattacaggcatgtgccgccacgcccagctaattttttttattttttgtagagacagggtttctccatgttggtcaggctggtcttgaactcccgacctcagatgatccgcttgcctccacctcccagagtgctgggattacaggtgtgagccactgcgcctggcgaaagagtaaacatacttaaagttcatgtaagatttggataatcgctcttaatctatataaaatgctgtggggaatttaaccaccttcatttgtggaaagagatgggttcacgggaagagtggcgagttcacagaatttttctaaattgaatcttgttcaacttggcttgggaagagggcttgatatttaaaataagtgaaatagagggagaactttttcacaaaacaaatgatcatccctcccattggtctattctgatggtttgattttaattataatatttaaggagaattggtatttgtgttgctgtgttgacattgttacatcaagctgggttgtgcctcaagaagttcatgatacaaggatttctgggaagctttgactttgcagccagggtgtgccccgagccccttgcacatttttcccttagtgtcccattggtcaagtctaccagtaagaataagaactatcagatttcaggccaggcgtggtgcctcatgcctgtatcacagcattttgggatgccaaggcgggcagatcatgaggtcaggagttcgagaccagcctggccaacatggtgaaaccctgtctctactaaaaatacaaaaaattagccgggtttggtgatgcacacctgtgatcccagctactcgggaggctgaggcaggagaatcacttgaacccaggaggcggaggttacagtgagccgagattgcgccactgcactccagcctgggcaatagagcaagactctgtctcaaaaaaaaaaaaatcagatttcaaattttattcagtaatacgagtattaggccgggcatgtaggctcacgcctgtaatcccagcactttgtgaagccgaggtgggtggatcacctgacatcaagaatttgagaccagcctggccaacatggtgaaacaccatctctaataaaaatacaaaaaattagtcaggcatggtagcagttgcctgtaatcccagctacttgggaggctgaggcaggagaattgcttgaaccgggaggcggaggttgcagtgagccaagatagcgccattgtactccagcctgggcaacaagagtgaaactctgtctcaaaaaaaaaaagaaagtaatataagtattaaaaaggactgagaggctgatatcatattgccttttatcacatactccccttccaatcatgccctacctaatctctctacctgctctaccctctggcaggacacaggcttgtgtctgcataacctgttgtttctttgctctttccagagagacaactgcagatgattcctaccgagtcagcccaggaagaggaagggggggcaaggtttttgagtctagggagggggagtacttttaagaacagcaacagaccaggcatggtggctcacacctgtaatcccagcagtggatcacctgaggttaggagttcgagaccagcctggctaacatggtgaaaccccatctctactaaaaatacaaaaaaattagccgggtgtgatggtgcatgcccgtaaccccagatacttggaaggctgaggcacaagagtcgcttgaacccagaggcagaggttgcagtgagccgagatggcgccactgcactccagcttgggtgacagaacaagactctgtctcaaaataaaaacaaaacagcaccagcagtgtccctactcttccaagtcaaagtgctgtctgcttctgccatctgtgctcagtgcaggatggcttgggttgcactgtcaagaatgcaggaagaggctagagaagtgctcagggtgtcatcagcataagggttgcagtgcaaagggccctggagataattctaggaggcggtctctaaggggatatccttaggtggggttccccattcttgggggcttttgttcactgaaaggggagttcccttgcccctcctcccttttaggttccccgaaagcccactgatgctccctgtcaactatatttggcttacacagaatgctgccctttgagcagtctccaactctctcgatcatcaatgagcaaaccagcgggggagctgagtcacaagcacatgatgtggggctggaaagcgagggggccacactcagaggggtgaccatgtaatcgtccagacccctgtacctttcctcatccctggggctagtccctcagggctttccgcactccttccttgtcttgagggactctgtatttctgtgttggaggaagggtgtttccctctgcgtacatacatatcagagggactgatgctttatgtgtcttttatatgggtgtggtggtgtgaggaattggaaagctcagaaatggaaaatagttaacgttcagagtagcagatgaacacagctctcacatttgcattttccctttcgttctgactcatcttcccctctccccaccctgttgcccctccaccagcctcacccattgacacaccctgtctgatctaggaagggttaacatgtgcctgcacccatgtggagggaaggcgtggtaggcctggaaagagagagtgggaggctggtctgaacattcgagggtcctggagccaaaggaagaaacgggagcttagggacagtatttgcatctaggaggggacaaggactcttagatccttcccccttaagagaagcctatgggaggccgggcgcaatcccagcactttgggaggccgaggtgggtggctcacttgacatcaggaattcgagaccagcctggccaacatggcgaaaccctgtcactactaaaagtacaaaaattagccgggcgtggtggcgggcgcctgtaatcccagctactcgggaggctgaggcaggagaatcgcttgaacctgggaggcagaggtcgcagtgagctgagattgcgccactgcactccagtctgggagacagagcgagactgcgtctcaaaaaaaaaaaaaaaaaaaaaaaaaaaagagaagcctatggggaagccgactgtgccttgtcaccagagcagcttaccagtacctgacttgtttatcttccagtcatttactgtgtatctaatatacgccaggcacatatcataaatgctttatccgctgggcgcagtggctcacgcctataatcccagcacttcgggaggccaaggcaggcggatcatttgagcccaagagttcaagaccagcctgggtaacatagtgagacccctgtctctaccaaaaattcaaaattagctaggcatggtggctcaaacctgtagtcccagctactcaacaggctgaggtgggaggatcatgtgagcccaggaagctaaggctgcagtgagccgtgatcgtaccactgggcaacagagcaagaccccgtctcaaaataaacatgtcatcaaaatttgttggataaatgaaaattttgctataggatcagggataagagaataataagaaacagaaaaagaaagttgagcctctaagaccccatcccttccccagattaaagagttctgaagtgtgaaaagaggggaaacctccggggaccttgaccccttgggcaggaagtgaaagaaacccaagtcctgatttcagagaaatgtcatttgtcatcagcccaagaaaaggagatttttctcttcgaagaccaccacacgtccttcctggggttgcccctttcagagcttgatgggaggatctgagtcactcacacacccacccccaggtcattcccaggcagcaaatgaggcttcccagtaccaagtcagggagagggaggaggccagcttctggctcctccaccctattcttgggatccaaatgtttcaatcctttttacttctgcagctgtgtgctctgccgtcatctctaagaaacaaccataccactgaatgctactgtgtacttacaaaccacactcatattcgtcacgtcatttcatcttcacccccacctccaaatgaggtaagcagatattatgcctatttcatgaatgaggttactgaggcccagagaagtgacttgcccaaggtgactcaaatagtaaatggcagagatgaaactcaaaggcagggctgattattccaaggtccttgctgccacagatacacttctttgactctaggagttcacaaacgaagtgaggagacaggaggctaggggcagaatgtgtgcattctggaggtagagggggtggtctctcctgcaggcagaaggcagaggcagggttagaaaaccacaccccttcggggggactgtggcagactgatacttgggacatccaatggaggcctgtgaggtcaggggcggggctagctccagggggggccccaggagccccaacagtagttcagagcatgcggtgtcctggaagaagctacaagcggtgagtgatagcctctctccagctgaggccttcttcccatcacaactctttctgtctcctccctgccaacctagagccctctccctgaggtgtccaagtgcagccctccctgccccaagggcccttgctcacagggaacctgcacctaggactctgcctgctgggtgctaagacactgaggttctggttctcttcgtatctgggttcccagctctcttcttaaaagccaatgtggtggttttgatgtgtgagaaactcctgcctggttgggtgctgtctttctattcttcactttttgtcttatgaaaaacaaattaaaccatctccttacccaaatcttgagaggaaacagcctccctgtctccagtccccacgtcctttcctcccatctcctcaggagtccattctccaaaaggtctctccatcattgggtcaggagcctcctctcctgtggcttctgcacctgctctcctctttctctggatgggaatgtctggttccttccctgaggatgtgttctagaagcttcagcttcacagtgatgactgccggatgccttagcgcctgcgctcctgcagccaggatccctatcatgctgccctctctgcctttcaggagcgatgggcttttgggggaggacccactagctttctaagctctcccgtgaaactgtgtcatgctccatcccttagtgccggcgttgactgggttttgtggtgatccttgtctggaatgaagaaagcctggcttgcgcagaggtgtttccctgcagaggggcttggagaagcagaagtggcagtatctgctatcttttacgtcagagactgccaactggcagacttcccgcacgcctgtcttaaacccactactagatatttctgttaactgactggcccttgctctttaagtcctgaatttggtctgatttccattctctcgccaccatgcctacctgctatgattctggataagctccaatcctctcttgggttactttatttgctcactcaggacagagggctctgatctaggaccagcaactcacaccctctcccctcacatccacaggcttgaaatgagatgagatgttcctccctcccctttcaaccatggacctcacactgtggacttcctcttagagcctctgagttaggtacccaagccaaggcacaatgtccctgccccccataagactgcccagcccctatggctctgatcggctggtacagctagcagccaggctccggccagcactctgtgatactctgatcaccgtagggagccaggagttccccgcccacagcctggtgctagcaggtgtcagccagcagctgggccgcaggggccagtgggctctgggagaaggcatcagcccttctacctttgcccagctcctgaactttgtgtatggggagagtgtagagctgcagcctggagagctaaggccccttcaggaggcggccagggccttgggagtgcagtccctggaagaggcatgctggagggctcgaggggacagggctaaaaagccagatccaggcctgaagaaacatcaggaggagccagagaaaccctcaaggaatcctgagagagaactgggggaccctggagagaagcagaaaccagaacaggtttctagaactggtgggagagaacaggagatgttgcacaagcactcgccaccaagaggcagacccgagatggcaggagcaacgcaggaggctcagcaggaacagaccaggtcaaaggagaaacgcctccaagcccctgttggccaaaggggagcagatgggaagcatggagtgctcacgtggttgagggaaaatccagggggctctgaggaaagtctgcgcaagctccctggcccccttcccccagcaggctccctgcaaaccagcgtcacccctaggccctcgtgggctgaggccccttggttggtggggggccagcctgccctgtggagcatcctgctgatgccgcccagatatggcattcccttctaccatagcacccccaccactggagcctggcaggaggtctggcgggaacagaggtgagtggcggggtctagtgctctgcctccaggctgggagggcatggcccaggaggggcagccctgctgggtggaagggcactgcatctctactgcacagttcctgagctggggaagagacaagaagctgctgccacagggcacgccaaagcccagcccccgggggaggacttgggataccccctcttcacgaaggggccaggctcccaggtttagccaaggctgtaactcttccccaccccatcccaggatcccactgtccctaaatgcccccaaagggctctggagccagaaccagttggcctcctccagccctaccccaggtaagcccctcgctgtcctgcatacacctgtaacatggtgtcttctctgggctggggctcgaggagtccagcctgagcagggcccctacctcccactgttccttccaggttccctcccccagggccccgcacagctcagccctggggagatggaagagtctgatcaggggcacacaggtgagtcgggcgggggcactcgtgcctcagccccactgtagcccttgatttcctgcctgaatggtacagtgagttggcgctgggattcctggccctgccctcctttgccttctctgtccccacaggcgcacttgcaacctgtgcgggtcatgaggacaaggcaggctgcccacctcgcccgcaccctcccccggcccctcctgctcggtctcggccctatgcgtgctctgtctgtggaaagaggttttcactcaagcatcagatggagacgcactaccgagtccacacaggtatgggcgccctgccctgtgtgaactgtcggctttcttcccaactccgctcctgagtctccacctgtgtgcccggttcccgcgcaatcccctagccccgtggcccgatccacccctaacttggccagctttcgccgccttcttccttccttcaccggcctccccttccgaccgctctaggagagaagcccttctcctgtagcctttgtcctcagcgctcccgggacttctcggccatgaccaagcacctgcggacacacggggccgctccgtaccgctgctccctgtgcggggccggctgtcccagcctggcctccatgcaggcgcacatgcgcggtcactcgcccagccaactcccgcccggatggaccatccgctccaccttcctctactcctcctcgaggccgtctcggccctcgacctctccctgttgtccttcttcctccaccacctgacggggtgtcggtagcgtcttagccaagagtccaattaaagaacgaaaagcgggccggctcggcttctgacctggcaccgctgctacggcggcctagcaaattccgccccagaagcgccccaggaagggcgccgagtgccctctcctggacgatcgcgggtcgcagaagcccaggccagcgagccctacagagtgaggacactgaagtgtgcaggagcgaaggttaacagtaggggagattgtcgatctcatcaccataataaagagtttcctgtgccctcccttcaggactagaaagccgagtttagtctgtgcacacccccgcccacgccccttgtcctgtagcggcccctggtggccctgcgtccgctgtccagcgggatggacacttcttccacccccgaggcgccccgtcctccccaggaggcagccggccccgaggactcggtgtccgggcacaccttgcggcatgccggtcctggactggtgggggctgtgcgaccgcaagtcactcgccccttccactgcaatccacggcgcgcggagtctgatctgggaacgctcggcccgggagagagaggaacgcgtgctccgaccctgctttcggccacccgcctcctctccgggagcacacggaccccgagaccgcggcctctccggcgtcttccctccacaccgtgccaagccgccgccaggtcgcgcctggaacggagactgactatgctttccaccgctccttctccagcccacgcctcctgcagccgcgaactgcatttcccagggcctcgggggtcccggggcccgagcccgcggcaccctgggagtggtagtccacgcgggccgccggcctagccaagaacaatgggaggagcctggggctaggaccacacctcccggagacccggcaacccgctttccgggtcctggccgggaaccccgccgtcccggccctcgcgccctggctgccggcggaagaagcgaggcgtccggactacatttcccggaggcccccgcggttcgcccctctgcggccgcgacgcgggggtctgtgctccccaggtgcggtccgagggcgccggccggccgcggactccctctcccgtggtgccctgcgcgtggccggcccggcccccggtctcccgcggcggcgctggttgttgtcgtgcgccgcggccgccccgccccgcccccgctctctcccctccccccggccctgcgcacgggccgcccctccccccgcctccccggcccctctcacggtgccaagatggcggcggcggcgggcggcggcagttgccccgggcctggctccgcgcggggccgcttcccgggccggccgcggggcgccggcgggggcgggggccgcggcggacggggcaacggggccgaaagagtgcgggtagctctgcggcgcggcggtggcgcgacggggccgggcggagccgagcccggggaggacacggccctgctccgtttgctggggctccgccggggcctgcgccggctccgccgcctgtgggccggcccgcgggtccagcggggccggggacggggtcggggccggggctggggcccgagtcgaggctgcgtgccggaggaggagagcagtgacggggaatccgacgaggaggtgaggcggttggaggcgtccccggcgccgggtggggcggaggccggggcttccaggggtctgggttgtcccgggggcggcgtgggcaggccgggtcctcagggttccttcggagagacggggcacggagggagggcggctgcatgcagcttccgggggaaagggcctctggaagtgggtagagaagccccggctgcagccaggcactcgcgcccgatgtcggtcccgctgaagtgtcttgggccgatccttttcggcagctggcaaagctagggcggtggaggtttgggcgaggaggcagtggggactgcatgtccagccagtcgtggttgacagcggcagcgtggccttggcagacaggttggagctgtctgggctcttacctgtgggccgccccgccgggcctcgcaacctcctggtttctccagggccccagtttctcttggcatctcaggtagagtggtggagggcttcctcttggggctcgggttgaacaggagtgggatgaaggccgggactgggcactctagcaggtcagagctcagctcaggatttctcccccagcctttcagaacaggcaggaaggtgtgggttgcgttgccctggacggttaataacaacctgagagctcgcagtggagcctgtacgaaagccatctgatgccctccccgccccttcacttgcgggcccctgttcccaacttaatgcagaaataaattgtggcccgaaagggtgtcagtggaggtcccactttggtctgaattggactctgaaggaatctgagtatggggcctgctgcctttcctgaggagaccctgtcgtcttctctcttgggccagtgaaccatggctttggctgtgctggtgtggtccggcactggggatcggagttcgaaatacctggcgcctccatccctagggagagaccctctcttccactacccgcgacctttgagtctttttcgttctttttaaataggcaggggtatgctaagtgggaactggggatattcctcgatacctcagatggaacgagggctttggcactgactgctgtttctcccctccaccccggtcccctaaatcaggagtttcagggttttcattcagatgaagatgtggcccccagttccctgcgctctgcgctccgatcccagcgaggtgagtgacgggggaactccacctctttagcgtcacaggaatttatcctcgcccttcgtgtcagctcttccctgttcaactagcctctgtcagttgccgaatgtgttctgtgttcagagtccaagctagtctgggcagcgggggaaacacacaagcaagacttagtccctgccctcctggagcgccttcctctgtgtgtagggctggcttgatccatctccccacaactattctccttttaggtcgagcgccccgaggtcggggtcgcaagcataagacgaccccccttcctcctcctcgcctagcagatgtggctcctacccccccaaagacccctgcccggaaacggggtgaggaaggcacagaacggatggtgcaggcactgactgaacttctccggcgggcccaggcaccccaagcaccccggagccgggcatgtgagccctccaccccccggcggtctcggggacggcccccaggacggccagcaggcccctgcaggaggaagcagcaagcagtagtggtggcagaagcagctgtgacaatccccaaacctgagcccccacctcctgtggttccagtgaaacatcagactggcagctggaaatgcaaggaggggcccggtccaggacctgggacccccaggcgtggaggacagtcaagccgtggaggccgtggaggcaggggccgcggccgaggtggtgggctcccctttgtgatcaagtttgtttcaagggccaaaaaagtaaagatgggacaattgtccttgggactcgaatcaggtcaaggtcaaggtcaacatgaggaaagttggcaggatgtcccccaaagaagagttggatctggacagggagggagcccttgctggaaaaagcaggaacagaagctggatgacgaggaagaagagaagaaagaagaagaagaaaaagacaaggagggagaagagaaggaagaaagagctgtagctgaggagatgatgccagctgcggaaaaggaagaggcaaagctgccaccaccgcctctgactcctccagccccttcacctcctccacccctcccacccccttcgacatctcctccacccccactctgccctccaccaccacccccagtgtccccaccacctctaccatcccctccaccgcctcctgcccaagaggagcaggaggaatcccctcctcctgtggtcccagctacgtgctccaggaagaggggccggcctcccctgactcccagccagcgggcggagcgggaagctgctcgggcagggccagagggcacctctcctcccactccaacccccagcaccgccacgggaggccctccggaagacagtcccaccgtggcccccaaaagcaccaccttcctgaagaatatccggcagtttattatgcctgtggtgagtgcccgctcctcccgtgtcatcaagacaccccggcgatttatggatgaagacccccccaaacccccaaaggtggaggtctcacctgtcctgcgacctcccattaccacctccccacctgttccccaggagccagcaccagtcccctctccaccacgtgccccaactcctccatctaccccagttccactccctgagaagagacggtccatcctaagggaacccacatttcgctggacctcactgacccgggagctgccccctcctcccccagcccctccacctcccccggccccctccccaccccctgctcctgccacctcctcccggaggcccctactccttcgggcccctcagtttaccccaagcgaagcccacctgaagatctacgaatcggtgcttactcctcctcctcttggggctcctgaagcccctgagccagagcctcctcctgccgatgactctccagctgagcctgagcctcgggcagtgggccgcaccaaccacctcagcctgcctcgattcgcccctgtggtcaccactcctgttaaggccgaggtgtcccctcacggggctccagctctgagcaacgggccacagacacaggctcagctactgcagcccctgcaggccttgcaaacccagctcctgccccaggcactaccgccaccacagccacagctgcagccaccgccgtcaccacagcagatgcctcccctggaaaaagcccggattgcgggcgtgggttccttgccgctgtctggggtagaggagaagatgttcagcctcctcaagagagccaaagtgcagctattcaagatcgatcagcagcagcagcagaaggtggcagcttccatgccggtgagtgtggtccctgggcccagcggcacacccagccatccagcctccattctttgcaaccccctaaccttccgcctccttggacactttccagcattgcggggaaccctcagaacctgcctttctgtgatcccccaccttcctttgttcctccccagacctggcccttctctgtgctagttccctgtccctatcttccttttttttttttttttatttttgagaccgagtctcactttgtccaggctggagtgcagtggcgtgatctcggctcactgcagcctttgcctcccgggttcaagagattctcctgcctcagtctctcgagtagctgggactacaggtgcccatcaccacgcctggctaatttttgtatttttagtagagacagggtttcaccacattggctaggctggtcttgaactcctgacctcgtgatctgcccgtctcggcctcccaaagtgctgggattacaggcatcagccaccacacccagctccctgtccctatctttcctcactgtccagcccctgaccctgtttattccctgccagctgagccctggagggcagatggaggaggtggccggggctgtcaagcagatctccgacagaggccctgtccggtctgaagatgagtcggtggaagctaagagagagcggccctcagtatgcatcgggaggagggccctgaagaagactggcgggaggagtggggctgcgggagcgcaagctgcccacacacactccgatttctcccccagggtcccgagtcccctgtgcaaggtccccgcatcaaacatgtctgccgtcatgctgctgtggccctgggtcaggcccgggccatggtgcctgaagatgtccctcgcctcagtgccctccctctccgggatcggcaggacctcgccacagagggtaggtggggagactggacagccatgtcaggtttggggatgaccccacacttgggtgacatgcaccaagagcctaggagagagggagccaagtcaggtgctcaggggttaggtggcaagtgggctggagtgctaggtcctagagcaacttcatttgggggcaccaggaacctggcgctgtgagaaagcgagagccaggttgtgggaaagcagggaagtgaggtagaagcctggtggctttgtggctccatcccctcctccctgcctgctgcaatagatacatcatcggcgtccgagactgagagtgtcccgtcacggtcccggcggggaaaggtggaggcagcaggccctgggggagaatcagagcccacaggttctggagggaccctggcccacacaccccggcgctcactgccctcccatcacggcaagaagatgcgcatggctcgatgtggacactgtcggggctgcctacgtgtgcaggactgtgggtcctgtgtcaactgcctagacaagcccaagtttgggggccctaacaccaagaagcagtgctgtgtgtgagtagctggggcgtgacctcattcccgtggttgttggtcccctaggcttcctacctcactcctcttctgcctggccagagcagtggggttggcattcttgtggagagcttcctctcttcccccagaccaccagtcccctaccctggtgacgtgctgctcccctccccagataccggaagtgtgacaaaatagaggctcggaagatggaacgactggctaaaaaaggtgacgagctttaaggagcatttcttctcaaaaccgtgttagagtttgtgctgtggagggagctgtttttctttgctctcctcccttgcagctcaccctctccatcttctccgttgtgtgctttcatagctcctgcgttcattccctgccccgcttctttctggcttctctcccagtgtcccatgtccctggctgagctcaaatcctactaagtcccctgttcccgcaggccggacgatagtgaagacgctgttgccctgggattccgatgaatctcctgaggcctcccctggtcctccaggcccacgccggggggcgggagctggggggccccgggaggaggtggtggcccacccagggcccgaggagcaggactccctcctgcagcgcaagtcagctcggcgctgcgtcaaacagcgaccctcctatgatatcttcgaggattcggatgactcggagcccgggggcccccctgctcctcggcgtcggaccccccgagaaaatggtgcgaactgcttaatgctttctctgttgatcatttatttggtcttgtgtcttttgtgtaggagggacaaggcacccagacccagggctctgtcagtctgatagagaaggtggctgagggcggaggaggagacagtttttaggtggatgtacagaactggcctatgaggttctcagtgagcctaatgagtgagacttaagggtcatcctaggcctggtgcagtggctcacacttgtaatcccagcacttttgggaggccaaggtgggaggatcacttgagcccaggagttcaagaccagcctgggcaacatagtgggaccccatccctataaaagcaaaagttagttgtatgtggtggcacgcatctgtggtctcagctgctcaggaggctgaggcaggaggatcgtctgagcctgggagttcaaggctgcggtgggctatgggtcacgccactgcattccagtctgggcaacagagcgagaccctgcctcaaaaaacaagaaaaagaatcgtcctggcgggtcttggttagttaaagaaggccctgggaatccaggtaacatttggggttgtagaagaagaggggcgtggaaggggagtgacctcactgctcattgtgtcctgcctagagctgccactgccagaacctgaggagcagagccggccccgcaaacctaccctgcagcctgtgttgcagctcaaggcccgaaggcgcctggacaaggtcagcacggcccgctccgagagccccttccctccaggagctacctggcaagtcagagtgacagacacacctgagtgtcgtggtgtgtccacatgagaggacaggccctgagggatgaggcgggccttgcctgtctggaaagcaaaggggtctggatcagggtctgggtccagtaggctgggggaaaggcggtgaggagaggagtctgcatcacggccaggctggcagctctgaattcccccacctttcctccccaggatgctttggcccctggcccctttgcttcttttcccaatggctggactggaaagcagaagtctcccgatggtgtgcaccgcgtccgtgtggattttaaggtatggcattgagtggggcgagtcacagagcctctggttggaagaacctcgatgactgtgtcatcgagaagccaggtgggtctgccttgtatgcctggcggccctctgatcctgcatcctctcttcccccaggaggattgtgatttagagaacgtgtggctgatggggggcctgagtgtgctcacctctgtgccagggggccccccgatggtgtgcttgctgtgtgccagcaaaggactccacgaggttagatctctgcctttcttcacagacccccagctctctgtcggtcctcacggcctgattccttgggccctctcagctgggtctcatcccttggccctctggcctcatgctatgcccatcattcactcctttaccctgtccccagctggtgttctgtcaagtctgctgtgacccattccacccattctgcctggaggaggccgagcggcccctgccccagcatcacgacacctggtgctgccgtcgctgcaaattctgccacgtctgtggacgcaaaggtcgtggatccaaggtttgggcccaagggctggccagggtgggtggaggcctgaaggtgagggcatccctgtgccagcaggtttcgccatctctgtctccacatccaacagcacctcctggagtgcgagcgctgccgccatgcataccacccggcctgtctggggcccagctatccaacccgggccacgcgcaaacggcgccactgggtgagagatgaggttcacccacttgctttgtctctaatgaatatcaccaccacccccaaacttgctctaggctggggctctcaggaggagcagaggttggggatcctcttaagaattgattagtaatgtttcctcttcaaaaatttcacataggtcagatttatattcagaatttgcatggagtggttttaggggcttatgaatctcacattccgtgggctcagaatcccctgctatagcctgatgtcctctcctgccctcatgttcctcctccgtgtctgtcctgcgtgttttctcctcttacctgtccctccttgcctgcttcctgcatatccccaattcctcctcgcccgtctcccgctcatgttgctccagtccagtgcctggttttcccctaacatcgccctgctcccccagatctgttcagcctgtgtgcgctgtaagagctgtggggcaactccaggcaagaactgggacgtcgagtggtctggagattacagcctctgccccaggtgcacccagctatatgagaaaggtggggaccgggcaggggaactggatgctgggggccacaggggaatggccaggctcttttacaggctttagcacagaccctcttttctcatggctttccaccttgtagctatgggactatctcttcaactcagggaactcttccacaggagtccatccagtatgtaaaacagggacacatagctcctctgagggtggtgggagtggaaggcctgggaccccactgtcttggtgtctgaggtacttcctggaacctcacgtctccattgagcggtttggaagccttattcaggcagtacattagcaaggccctgtgttctgcagagtctgaaaagaggcctcatcctaaggccgagcacagtggctcacgcctgtaatcctaacactttggaaggctgaggcaggtggatcacctgaggtgaggagtttgagatcagcctggccaacatggtgaaaccccatctgtactacaaatacaaaaattagccgggcatgatggcgggcacctgtaatctcagctactcgggaggctgaggcaggagaatcgcttgaacccgggaggcggaggttgcagtgagcggagatcttgccactgcactctagcctgggtgacagagcaagacactgtctcaaaaaaaaaaaaaaaaaaaaagcctcatcctcaaggagcttttagggactagtaggggcccaaaacaggggcatagtggaggcagctaaggtactgctaatccttgaacagagacactcagggctgagtgggaactccagcacctctgactccttctcttccctttctctaggaaactactgcccgatctgtacacgctgctatgaagacaacgactatgagagcaagatgatgcagtgcgcacagtgcgatcactgggtgcatgccaagtgcgaggggctctcaggtgagtcagtggagcacctgggctgcagcctcaaccctgtggggacccctgcccccaccacaggccccaagaggactggtgggctaagggtccttgctggcctaggggctgctgggagccctcacatcctctgaaaccacttttccctttcccacttggctatcctagatgaagactacgagatcctttcaggactgccagactcggtgctgtacacctgcggaccgtgtgctggggcagcgcagccccgctggcgagaggccctgagcggggccctccaggggggcctgcgccaggtgctccagggcctgctgagctccaaggtggtgggcccactgctgctctgcacccaggtctggagggccctggaggcaggatgggccggggctaggcccacccccagccctgctaacttccccgctttgcagtgtgggccagatgggaagcaactgcacccaggaccctgcggcctgcaagctgtgagtcagcgcttcgaggatggccactacaagtctgtggtgagtggtacaccaggaggagcaggtgggtggcaggaggagagggctggaattgtgcagaggggactcagtctctgacaaacccccttacagcacagcttcatggaggacatggtgggcatcctcatgcggcactcggaggagggagagaccccggaccgccgggctggaggccagatgaaggggctcctgctgaaggtgagctcttccggggatgcttgtggggtgggggagtgggaccttcagaccctgcccctgccagctctcctggggaagctggctcttctcatcctgttaacccactccccagctgctagaatctgcgttcggctggttcgacgcccacgaccccaagtactggcgacggagtacccggctgccaaagtgagcaaggctgggtagcagaagggaagccggggagtgagggcaaggccagggcatgcaggggccacgctgggctgagaagagatgagcagaggtagggtctggagcagagctggagaggagggtggtggaacccaggtgagattccctggtggttctagactagcaaagctttgtttctgctttgtgcaggggaatgctggggacaaagcagtgagcgaatcagattgggctctgcttaaagagctcattgtggagccgggcaggcactgaagacccagatggtcagggcagtgatggagaataccagggggcggtgggggcccggaggggtacctgctggagccgaggtgtcagggaaggcttcctgaaagagatggcattggagcagagctggggaggaagagtattgcaggcatgaggagcagcatttcgtatgtccaagctggcacaagagggcctggcttatttggtggactgagagaaattccacatagagagggagtagcgggtgtcatggcgagttcaggctggtttgtggatgggcccccgttcagctgcccttgttgggcacatcagctgctaaccctgcctgtccacagcggagtccttcccaatgcggtgttgcccccatccctggatcatgtctatgcgcagtggagacagcaggaaccagagaccccagaatcagggcagcctccaggggatccctcagcaggtactgggaagtgggggtccagaagccagggccctgtgttggtggcctggctccgggtcctgattcttagacctcccttcacatttcctcttcagcattccagggcaaggatccggctgccttctcacacctggaggacccccgtcagtgtgcactctgcctcaaatacggggatgcagactccaaggtgagggctgctctgtgacgcaccaggttgtggggcctgttccctggcctccccacatcatgccactcctcttctgccccaggaggcggggcggctcttgtacatcgggcagaacgagtggacacacgtcaactgtgccatctggtcggcggaagtcttcgaggagaacgacggctccctcaagaatgtgcatgctgctgtggcccgagggaggcagatggtgagggcgcgggcgcagagaggtggacagctctctggctcttggggaggcctcctccggtgcaaacagctcttacttcacattccctacctggcatcctttcactgccaggctgaggtctcttggttgccctgggacgttggtgctgatggcagctttttcctatgtgggccctctggctgtaatctgggcctgaagtgtgggagtctaaaagtgagaagagtgcccattgattgaacctgggctgcacgctttccatgctgggtggcgttgagctctcactacatccccgtgaggttagaattcccccactcctcacagtggtgcctgggccaggtacagagagacctcaggcactctcgggcattggggtggtagagattcccactgcgggggtatctgtgaggatgaaaataacacaacctccgcctgaaaactgtgacaaagataatcacactaatgctatcagcaagtattgtcattcttgcttcaaagaaccagagagagtttggtgtgcacctgggcctggatgcggctggggagaggctgcgcctagggagagcctttgccgtgccaggctagacagggacccatgcagactcagtgacagtggtgcctggcgcccagccccagccctggcttctcccctgagctgccctcccctacgcagcgctgcgagctctgcctgaagcctggcgccacggtgggctgctgcctgtcctcctgcctcagcaacttccacttcatgtgtgcccgggccagctactgcatcttccaggatgacaagaaagtcttctgccagaaacacactgatctcctggatggcaaggtgggccagaactgtggggtacacggttccttccccacctctcttcctgttcacttagggacccccgtggcccccaggcctggccctactgcctctcagtgtctcctcatctgttttcccagaggcctttaggccaagcccctgactgttcagacttccctggcatccacctcccccaccaatgcagccacctcactttgccaccccctcttccaggaaattgtgaaccccgatggttttgatgttctccgccgagtctatgtggacttcgagggcatcaacttcaagcggaagttcttgacggggcttgaacccgatgccatcaacgtgctcattggtaagctgcctgctctccgccctgtcctcctaccctgtcctgcctgcctctcctgacctccgctttgcaccacaggttccatccgcattgactccctgggtactctgtctgatctctcggactgcgagggacggctcttccccattggctaccagtgagcggtcggggtgatccatggggccaggggactccatagctggatcccatttcccaagcatcctaaccgtcttatcccacatgccaggtgctcccgtctgtactggagcacagtggatgctcggaggcgctgctggtatcggtgccgaattctggagtatcggccatgggggccgagggaagagccagctcacctggaggctgcagaggagaaccagaccattgtgcacagccccgccccttcctcaggtgtggctttggctctgtcttcttcctgaataccgctctccctaaacaaacctacagatctctgttccccgctcccttttggaaagtccaggaggcttgcttttgcttcagttgctgtaatgtaacggcagctcgcttactgccatgccttgtgtgccaggggctgtgcccggcttttcatgggaagtgaggtggggagagcggcacgctgcctacttgaggtggggtactggcttttggacgactgcagggagtagagtgcttacagctccctaacttggggcactgtgctcatggagcgctctccagtgtcgccatactacaccttgaaggggacagtggctgaacacagtaacatgctagggaagctggaattggaactgcatctgctcagctcccaaaccggcccccttacagccacactggctgtgggatgtggctgagagctggatggcacagggcaaagaatgggcttggagatgggggagaggttattgtgggcagagcaggaggcagaagagatttggatggtaggaagggctttattccaggttggagcatgacaagaagtggacagaggaggagggtacacccatcccgtctggaaaccagggagttttgggtggaggagggagatcagtttgcagaggttgggtggagccaggtaatggagagcctccgggccggggcgggcgggagcgtctgatgtggcttggatgcaccaggcaagtaagaaagtggtaggactggccgtgctggagggagggcagttccccatggcgtgcaaagcctgcagcagaggcagagaggagatggcaaggagcgagtggggagaggccctgaaggccccctggcccaggtgtgtgcaggttttgccaactccacggtgggtttagcctgggtggtcactggaaactggggcctgttgtgactgggtcagggtcggggacctgggaggcatagtggctcaggatgagagcatgtgggcaggctttgacacagagcccctaccaccccaatgccatttctcgcctcttcagagcccccaggtggtgaggaccccccactggacacagatgttcttgtccctggagctcctgagcgccactcgcccattcagaacctggaccctccactgcggccagattcaggcagcgcccctcctccagccccccgttctttttcgggggctcgaatcaaagtgcccaactactcgccatcccggaggcccttggggggtgtctcctttggccccctgccctcccctggtgagcaccgggcatgtgggggttgggggtggagccgcggaggtgggagctgctggtaacaccaaccctccccccacaggaagtccatcttcactgacccaccacatccccacagtgggagacccggacttcccagctccccccagacgttcccgtcgtcccagccctttggctcccaggccgcctccatcacggtgggcctcccctcctctaaaaacctcccctcagctcagggtgccccctcctacctcagtcgtcacagccctcacacctacctcaggggagctggctccccctggcccggccccatctccaccaccccctgaagacctgggcccagacttcgaggacatggaggtggtgtcaggactgagtgctgctgacctggacttcgcggccagcctgctggggactgagcccttccaggaagagattgtagccgctggggccatggggagcagccacgggggcccgggggacagctccgaggaggagtccagccccacctcccgctacatccacttccctgtgactgtggtgtccgcccctggtctggcccccagcgctacccctggagccccccgcattgaacagctggacggcgtggacgacggcactgacagtgaggctgaggcggtgcagcagcctcggggccagggcacgcctccttcggggccaggagtagtccgggcaggggtccttggggctgcaggggacagggcccggcctcctgaggacctgccatcggaaattgtggattttgtgttgaagaacctagggggtcctggggatggaggtgctggccctagagaggagtcactccccccggcgcctcccctggctaatggcagccagccctcccaaggcctgaccgccagcccagctgaccccacccgcacatttgcctggctcccaggggccccaggggtccgggtgttaagccttggccctgcccctgagccccccaaacccgccacatccaaaatcatacttgtcaacaagctggggcaagtatttgtgaagatggctggggagggtgaacctgtcccacccccagtgaagcagccacctttgccccccaccatttcccccacggctcccacctcctggactctgcccccaggccccctcctcggcgtgctgcccgtggtcggagtggtccgccctgccccgcccccgccaccccctcccctgacgctggtgctgagcagtgggccagccagcccgccccgccaggccatccgcgtcaagagggtgtccactttctccggccggtccccgccagcacctcccccatacaaagccccccggctggatgaagatggagaggcctcagaggatacccctcaggttccagggcttggcagtggcgggtgagtgcgggtgctgaggctggcagagcaggcaagggggcagatgggcgggagatgcggctcatccttctcgggctcgccctcccaggtttagccgtgtgaggatgaaaacccccacagtgcgtggggtccttgacctggatcggcctggggagcccgctggggaagaaagtcctgggtgagtggccaggcccctctccctggagggtctgggacctctgtccttccccttcctgacaggtctcttctcgcaggcccctccaggaacggtcccctttgctgccacttccggaagatggtcctccccaggtccccgatggtcccccagacctgctgcttgagtcccagtggcaccactattcaggtagggaccggccttgccctctccctccttgcctgtgcctggctcagctgggtgactcacagatgcaaaatcagccctctttcaaaaccagtatctactcccaggggccaagcctgaggctcggtgctagagttagagatgaccttggggagcctctggccttgtgggagaaacagacatggaaatgacatttcgcctctacgtgggatccttttaagggtctttgtccagcatgcccaagagcctaggggagggcctcagagcctagcctgccaggagctgagagagagcttcctagagtagccaaaggtgaagttctaggatcatctagagggaatgcagcccagctagcaccgagatgagggtcagggacagtgggaagatcagaagagtggtgtcccagaggcccagggaagggagtcgtcacatctcagctgccacagagactgccaggcctgtggagtctagcgttggtgtccagtgagagcaggtggcacagggtggggcgttgtgtccaagtccagaattgagaccatggttgaagaaggcaaaacagcccaagcacttggccagagttcagctaaggatcgggagcgggaggtgggcgagcagcgtggaggtgcttggtgtgagggccaagacagcggagccatggatggcagggaagggcaggctgggatggaaaaggcagtgggaagaggcctggtggctggttttgaactggtgacctctgaggtaaaggagaggagggaaagcaggtgtttatgcagaaactgtaatacatggggtggaggcccctggaggaggcttggctgatggactccttgaagctggcggtggagtggtggagttttctgttggtccctgagggcagtggctgggggagtggctgcggccaggtaagctggtggtcgagcagcctgaggctgggattttgtggtggcccaatcctgtccagatgtttggattttctcatgacacacagctcagttgctgagctgggaagcagagtgacgtggattgagagtgcttaactcagaggctgcttatgtctcagagatgacatgagaatatggcagtggccttaggaggtccctgtcctcagggatcagaccacattttggtgcgggacacagacatgttagcaagggcaggttagagtgggcactgagaaaccgagcagtgagagcacctgccagggtcctgtggtcagtcctgctgtgtttgggaaactggaagtgagggttgggggacacagggaagaagttgacagaggtggactctggggcactgaggcctggagaagacgggagtcacacggcaggagtgttgctttagagtctcccttggggcaggggaggtggggcagggtggcctggagaggtgacatcgggagagtgtggccatgtgggttttgcctctcctaaagcctgttccactcaagcttttgtgcccccaacccccagtggtcagtccccagcccacacctgcttgagcagcagcagcgtttggtgcagcggatccctcccgccttgaagcattgtcttcccggcttccaaggctgctcctgctctcacctctggtcctgcctccttgctcacagctgtcaggctagatgtgtcccgggaccctggccttgacttctgtgtatgctcactcccaggggctcccttccagcttggtggctgtcctcccgtctgtgttctgattgtctccacattgctctctccagcctagaccctgtccctgaactgtggcctcctccatcctgtcctgctgcctgcccaccatctccaccagcaggttgcagggggaggtttctaagaggcctctcaaagtcagcctgtcccaaactgagccctccacctgcacgccaaacccattcttcttttgccttcgctgtctcagtccacagcagttttatccttccaggtgttcaagcccagcgttgtcccgacccccatcccccttcttcacatccacatctactacgtcagcatatcccgtctgccctgtttaatctattaaccctcgagaaatcccctaaatagctcataacatacagtgtact[136 bp omitted]atctgtactgaaaatacaaaaattagccgggcgtggtggtgggcgcctgtaatctcagctactcgggagactgaggcaggagaattgcctgaatctgagaggcacaggttgcagtgagccgagatcacaccattgcattccagcctgggagacagaacgagactttgtctcaaaaaatgataattttatgtttgtaacagttacagaaatttgctgcatctaaaaaaaatagatgtgcaaaatacaattctccagtattttaaattttgtgtgagaaacagaataatgacaggtagatgggatgtatggtacactgggtttgagtgagccataggcgtgtcctgaagagccaaaaggccccaagcctctgtggaatgcttttgtacccaagaagtcctgcagaagaggagccgcaggctccttaggggaagaaatgtccattctgcagggctcactgggtaactggagcagaaggagggccattagaccctagtatctgtgtctgcgcctaggggtggagagagtggtgtctgctgggagcacagcggggctcaggggcttttgagtccgggaagggtgatcttcactccaacctgcttcttgggaccaggtgaggcttcgagctctgaggaagagcctccatccccagatgataaagagaaccaggccccaaaacggactggcccacatctgcgcttcgagatcagcagtgaggatgggttcagcgttgaggcagagagcttggagggtgagtggggggagtgcagtggcaggagggagagtgtccataaaacaccatcctgactcagctctggctctgctgtctccccaggggcgtggagaactctgatcgagaaagtgcaagaggcccgagggcatgcccgactcagacatctctcctttagtggtaaggagtgggccccacagggggcagggagctggatgtctccccgagggcaccatgggccctccacatgacaggtgtgtcctcaacatctcccctcaggaatgagtggggcgagactcctgggcatccaccatgatgctgtcatcttcctggccgagcagctccccggagcccagcgttgccagcactataagttccgttaccaccagcagggagagggccaggaggagccgcccctgaatccccatggggctgctcgggcagaggtctatctccggtgagaggtctggggtgtgatgcctgggtcagggcgcccctatgagagctcttgagggtgggagttaactgtagaggttggaaactgaggcctggggaggagacactaggtcacttgaagagttatttctagagttagccaggctccgtggctcatgcctgtaatcccgccactttgggaggccgaggcaggaggatcgcatgagcccaggagttggagaccagcgtaggcaacatggcaaaaccccatctctaaaataaaaatttaaaaaagttatttctagagctgacatcagaaaaatgaaccccacccatttccctgttagctctgtcttcaacagtatattcctccttcccctgctgccacctgcaggaagtgcacctttgacatgttcaacttcctggcctcccagcaccgggtgctccctgagggggccacctgtgatgaggaagaggatgaggtgcagctcaggtcaaccaggtatggagtgtgagctggggggcgggtggtggtctggaagggtcttagagagtgagcaggggtgagagaggtcattctgagcaccagcctgggtgacactgctgtccctcaccagacgtgccaccagcctggagctgcccatggccatgcgttttcgtcaccttaagaagacgtccaaagaagctgtgggtgtctacaggtgagtggggttgggggggaggatgccccttgggtggacggacaggtgcactgggtagggggtactgtctggtttctgtccccctcccccctgagttccctgttcatcctgccctgcagatcagccatccacgggcgaggcctgttctgtaagcgcaacatcgacgcgggggagatggtcatcgagtactctggcattgtcatccgctcggtgttgactgacaagcgggagaagttctacgatgggaaggtgggctcccagtggctgtgggaagacagtgggtgaagcgagcctgtccgcggggacagagcacctgatctccccacctcatccctgcagggcatcgggtgctatatgttccgcatggatgactttgatgtagtggacgccacgatgcatggcaatgccgcccgcttcatcaaccactcctgtgagcccaactgcttctctcgggtcatccacgtggagggccagaaacacattgttatcttcgccctgcgccgcatcctgcgtggtgaggagctcacctacgactacaagttccccatcgaggatgccagcaacaagctgccctgcaactgtggcgccaagcgctgccgtcggttccttaactgaggccgtggctgcccaccacgacccctcacacctcctgctgccgtcgctgccatcttgcccctagcctgggggctccctagcccctcccagagcatctcacccccaccctcatgttcagggtggatgtgggcatgcaggtgacaagggccctgcctccacccctccagcccatccagcaatcgccccctttctgccctgggggcccaggatgtagatattgtacaaaggtttctaaatcccttcttttctatgcacttttttatttaagaggtggggtcccaggtgggaacccccccacaataaagtctgtcaatgtttggagaggtggtcttcccatttgtaggctgtgggggcaggtaggaaccccacttctacacacccacccatcatgacccaaggaagttcatcagcctcaacaggtaggtgaggccatcattcagaattagaagtcagtcatggggtctgttacggcttcagaacaacacaacacagcaactgtctgtagcagggttgtttcccagaggggattctggtggcccagaggcacctggggtcagccctcccacatgtggccctgtgtgtatgttggaataggcccttctagggcgaagagcagtgaggctatctgttgggtctttgcccaattaggattgtacttcaagaagtacttcagtgctaattgtatactgggcttagtagtcagcaaagttctttattgggtgttaagcccagcaaaccccagatgagccaagcttggacagcacccgcaatgcatctgcccgccctagctgggcgaggtgtgtgccaagctggcccagggaggcagagggctcccttgccaccaccatctcaatcagagcccgcagcggcgagcgactcggcctcagcgaataggcaaaggtggaccaggcagcaggcagcccatatcttgcggccaggtgtcgagtagtgccatgggccatacccccacctggcccaggctcagggtccagcagtacaatcagctcttccagcacctccagctcatccaggaggcgagacaggggttgtgacgccagactggacagttctggaagaaaggggaagggtaaaggtgcggaagagcgggcgtccagtccaccttccctgccccggggctcctccaggactaacccctgctcaggagtggaagtagtgaggcctccttccatgtgtcccctgtctccagggcgcctggggaggacagatgcgaggaggaaggggtgtgggtgttggggactccgcagaccaagccaggatagggataggggtcggctttctccttgggccagcagagatgccagagcagaataaacaggaggatcgctatcaccgccaaggtcaggagcaggaccagcaccacgagcggaaggaaattcggccaggcctgctgagggacaggctcaggggtcctccaggcaatggaacttgctggtgagctgcgctcctgggagctaggggcgcctgggtttccaggtgtgagggggcagtgccccttggcagggaccggcctctggggataaggggttggagtaaagctggaggccacactccactcctgcccgctcccaaacctcccaactttatatcctttaatggggccacatcccatctgatacggtatctgataaggtagttgggccccgcaaggcccaactaccttaacctaggacctcccgacccctgcaggccagccacctcctgaaaccacggccccaccccttacgtggggctacgccggctccctacatctaggccccccacctccagcacgcccttgccctgccgggagtcccatctgcacctctctgcagcgccacggggttctgcccccgcccgcggcgggagtaggggtcacggctccgccgccgcaggggctacatagctccgcgccgtcggggttgcactgcccagaagaacactttcggaacgggggcgttacgaaatcgccgtggtcattgagtccgcagttttcccggaactcatagtctagcgggaaagctgcgctccagtgcggccgcctagcccgcccctgcgcgggcaacgccctctcccttcgccctatcccagcgtgccccgcccctccaggacgcttccagcctattagcgtgcgccccggtcttgtcacttttctccgggctcgccttttcacccccctccagcctgctccgcacgaagctccgcccactcccggcttctctacataaagcccaccctttccacgcggcccctatcccgcctctccagccatatccattcgctgttgccctacggtagcccgcactatctgcacaggctctgcctgccatccctgtctgatctgcataaggcccaccgcttagacccctaagcaagcctctctggcccgtagcccacagacctcgccccttccccgctccctatcacctgcaagctccgcccaagcaaggctcggtctcggattctcacccgggcaggggggcggcccgaagcgttgcaggcagctgctgcagcacttgttgtctgggttccagtattcaaggcggccgcagtactgggaggcttccggcggtggcgccagggccagaagcaacaaggccgtcaggaggcatcgtccaggccccatctggggggccgtgatagcgggacttccaaacacagcgcctctgctacactttccggggaaatcgggcagaagaaaggacgcggtgatgtgggggaacagaattctcacgcctcttcggaagccgggaatctacccccgagccctcatcccccaactgagccggttatcagagaagcccacaaggccactaggggactaacagggctgcggatctagattgcaagaatgcatatcccacctctgccgtgtcctcacccacccaccctcccttttccatccctaaaataagacaatgatagcacctgtctcatagggttattgtggagaattagaaccgtcattagaagtaaagcaggggctgggtgtggtggctcatgcctgtaatcccaacactttgggaggccaagacaggaggatcacttgagcccaggagttcgagagatcagcctggacaacaaaatgaaaccccatctttacaaaaaaaaaaaaaaaaaaaaaaaacagcaaagcactttgccaagtgcagtggctcacgtctgtagtccctgctactagggaggccaaggtaggaggattgcttgagccatgaattacagaccagcctgggcaacacagcaagacctcatctctaaaaacaaaaaaaactggccgccgggcgcagtggctcatgcctgtaatcccaacactttgggaggcccaggtgggtggatcacctgaggtcagtagttcaaaaccagcctggcctacatggtgaaaccctgtctctattaaaaatacaaaattagccgggcgtggtagcgcatgcctgtaaatcccagctacttgggaggctgaggcagaattgcttgaacctgggaagtggaggctgcagtgagctgagatcgtgccattgcactccagcctgggcaacaggaatgaaactccttaaaaaaaacaaaaacaaactaaagtgctgaaaacagcacctcacatacagtaaactcagtgtttaagtgtaaggcattactaactcccatcacaattcggcaggcacggaggagtcagccccatactggctggagaccacctcccagcacctcacctcacctttgaatcctaatctccttggggctagggctcctcccacctgccacaaccaggtctctcccccttgaataagcctcagatggaggtgctaaggttttcagcacaaaggtgtccccaccctaccagtaccgttagggtcctgggtcccaagctggccgtgccaagttcctcagctgaagttgtggccaggacccagtcttgtttccccttttcgtcacatgtgtgggtggagggaaatgccaaaccacagcaaaagcaagttgatgccgaagtgaaacacgcagctttattaagacaggggcggtagaagaaggtctccatgctgaacagattacattatggagcccgggagcctgggaaggatggggcaggagagtgaagggggctttgaggagaggtcctgccaggaacatctgtccctgttgggggtgaagggtaagggggccagggcctcagaagcggccatgccagtgatcaggggaacaccgatggttcctctctcggggatggtggccagtatggaacctcgggggtgacctgggaataggagcgttgagagttctgttagaaccctgaggagtggtgcagagatcctgcaggcctgcctctctgctctgggatgaggcaggagggtgctgaaataactagagttctaagacacgacctcagtggccagtatcaggggaactcagtggccagtatcaggggtggcaatccaggctggtcgtggattaggggttcaggctggtttggggattgggacttaggtactggtctccagatggagctcagaactactcttagggtataagagtcttgggaatgaccgggcgcagtggttcacgcctgtaatccccacactttgggaggccgagatgggtggattacctgaggtccggagttcgagaccaggctggccaacgtggtgaaaccccatctctactaaaaatacaaaaattagccaggcatggtggcaggtgcctataatcccagctacttgggaggctgagaaaggagaattgcttgaacctgggaggcagaggttgcactgagccaagactgcgcctttgcactccagcctgcggaagaagagcaaaactcc[136 bp omitted]tggtgaaaccccatctctactaaaaacacaaaaattagccgggcatggtggcaggtgcctgtaatcccagctatttgggaggctgaggcagagaattgcttgaacccgggaggcggaagttgccatgaaccaagatggtgccaatgcactccagcctgggcaacagagtgaggctccatctcaaaaaaaaaaaaaaaaaaaaaagattcttgggaacgtggttactggggcttagggttaggctcatctgaggatataggggccttaggacatgaggagacatagcaggctggtcctgaggtacctgcgcctgggtccccgcccatagagctgcctctggaggttctgggaaatgggccgcagatgcatgaagttgcagaagccacctcgggtacattccctgcatagagggtagagagatggaggaagccattgtcactgacagcccctaccacgcattcaaagtctgggattccaagtgcccatcccacccttgaactaccataccccatctcatactggcgacagcatgactcccggaagtcagtgacaggagacagctcaccgtgcacagcctgcccgttgaaccagcggttactgagttcagccacggcccgctctccatcctcctccctccggaactgcaggaaatgtcagtcagggtcagcaggagaactcagagatcttcaggggactcactacccgctctggggctggactggatttagtgatgaaattcaagctgagagcctacagtggccaccatcaggcattgaaacgcctccacttctgggccctaagtggggggcagcaagcaccttgacatagacgttgcccacgaggtggtccccaaggttgtcgcacacattcatctcttcaatctccccatacttctcctgcagttctgtgaacacctcctgtggaagacggggaggaactcagctgagctcccacaagaaaccccatctgcccctaccaaccctcacctcgaagaagctatcatagtgctcctgcacctccacgtcactcacatgacctggggtgggggcgggcagggtggaatcagagtgtagcctactgggggctgttcaccttgcccccaggcctggtcccttactcacagtgtgatccgtctgcagtttgggctgtgttctgtggattccggtacaggttgagcagcactatggtctgcacagaatttaaaaggggcggggcctgagctcagagggcagggctgcatgaacagagagtgaggcatgaaggttgggggtggaaccttacaccccagcctaagcatcatgagtgcatcggcgatcctttgcccctaagaaaccagaaaagggatggaggggactggcaaggatgaacagcgggatggaagggactggcaaagatgaacagccgccgtgtgtagcctgtacgcatgggggcgcgaccaagttcccgggaaaacggcacgaagaccggtgggaggagcctgcagaaaggtccaatgagaaaaaaagccgggcggtggggagggactcaggaacccggaataggcgggacatggtgacgacggccccagaaggggaagggccagggagccgttaacccccgaggctccgtgccgggtctcacctggctgaatgtcggcttgttgtgaagccgggagcaccggtccccgtgccggcagaccccgatcttaaagtaaaaagagcagttaaccctggaaaaggtgcaaagacaaaggtgaaccgagggccggggaagctgggcaccccagaaacaccgccccaccacccaggaccccagtaccccggccccgaccccccgagagtccactcccagcgcccgttctcacttgtccttctcagtcccgaatatcgaagctaaatattcagccatttttacccaagccctccaggtctggctgctcttacgtcacttccgttgcttaggagcactgggaagtgtagttcgttgccctctccaggcgcttaccaagcgctcggaaacgccccagggcgcttgcgcgtgggaggcgcgcgccctccccatagactccccggtaggagttcttttaacagcgcatgcgtgcagtgttgcctcgcccaaagaagactacaatctccagggaaacctggggcgtctcgcgcaaacgtccataactgaaagtagctaaggcaccccagccggaggaagtgagctctcctggtgagttgggggtcgtttcgcccaccctagtaaatataaagagctctttaatccagccagcttactagtgggggtggggatgccctgctttcagcaaaccgacctttacatttatctctgatttgttctaataggggcgtggttgttcgtgatccttgcatctgttacttagggtcaaggcttgggtcttgccccgcagacccttgggacgacccggccccagcgcagctatgaacctggagcgagtgtccaatgaggagaaattgaacctgtgccggaagtactacctgggtaaggcagatcgctagggtcccaggagaagagaggggactggactagagcacccgagggaagagggcctcggggcctggattcttaagtctaagagatgaaggacctgcgaacgccgactcctggatttgagtggggagggcctgggtcctgaggaatgaggaagctggggcctcaatttctggatcccaagagaggagggggattgagggcctggactcttgggtcctgtgaaagagatggttgaggaatcagattcctggatcccaaagaggagccagattcctgagtccctgacaacagaaatctccatttgaacttgggtgtgggagagtttcttccaaatagatctcggtgggagttggagaagatcttcattgccttatgaggttttggggtttgtttgtttgtttttctttctccctaggggggtttgctttcctgccttttctctggttggtcaacatcttctggttcttccgagaggccttccttgtcccagcctacacagaacagagccaaatcaaaggctgtgagtctagagcacagaggagggaggccagtggcaggggagagggggaagcggggaatcttggtgggaagggacaatggaggatccaaaatgttggggctctgggtgagaagggaaggctggtctagggaagtctggagagcagccggaggccaacccttccagcttctgtttcccatgacagatgtctggcgctcagctgtgggcttcctcttctgggtgatagtgctcacctcctggatcaccatcttccagatctaccggccccgctggggtgcccttggggactacctctccttcaccatacccctgggcaccccctgacaacttctgcacatactggggccctgcttattctcccaggacaggctccttaaagcagaggagcctgtcctgggagccccttctcaaactcctaagacttgttttcatgtcccacgttctctgctgacatcccccaataaaggaccctaactttcgatactgacttcctgggatcttttagaggttgaggcataaatgattattaatatttaaaaacatctgttgagagctttgtacgaggcttagtatttagacatgatgtacattttttacagtgcatactactcataatcttctgaactaggaactttcctgctcaggaaactattagatgagaaactaagaaaggaatagtgcttccatttctttttcttttttcttttttttttttttttttgagacagagtcttgctctgtcagccaggctggagtgcagtggtaggatcggcctagtgcttccatttctaggggctgttatcctgtactggtagtcgtgaattcaaaaatataactttcctactgtgggctgcagtattctcatcagaagtgtagatcacgatgctacttcctgggatttatctggaccaagacgtgtgacaaatggaagtttcccgttttctgaaggaagtgttgtctgcaaaaataaaaatagtcaagagctttctcagagaatccttccttgaccatccatcttatttaaaattcaatcaccaccttgatattcctatgtccctttcaggctacactttttttgtgggttttttttttggggggggagaggggtttgttgttgttgtctgtttgtttttctagatggagtcttgctctgtcacccaggctggagtgcagaggtccgatctcggctcactgcaacctccgcctcccgggttcaagcgattctcctgcctcaaactctcgaatagctgggattacaggcgcatgccaccatgcccggctaatttttgtatttttagtaaagactgggtttcaccatgttggccaggctggtctcgaactcctggtcacaggtgatctgcctgcctaggcctcccaaagagctgggatttacaggcgtgagccaccatgccccgcccagatcatattctttctcctattacatttcacttaaaatttacttgtttactgtttatcttccctcctttaaaagataagctccattagcgcagggatttttgtctattctgttcctcaaggtgtctccaatgcctagaagagtgcccgacacactaataaatatttgcaaaatgaatgaagttgtacctgcaaagagattaacagatacctggcacctagcgagtgctcagtgagagggaacccaacgttattttacattagtcttcctcttagggatgaagggaccccaacggttggttaaatccggtaaagagctaacttggtgttgctcaacccttctcacactacaagtcccgggaagcctcgcgatgccctaatcctttgtttcccaccgtgccccgcgcggcgcaggcgctgttactcagggtgagtctgggaagctggaactacacctcccaggaagctagggggtagatggtttgtttccggaagcaaagccccaggtgggtgggacctaaagctgggagactacggaggcagctctcaattggtcaggatgcgagattgacggctgcaataactaataggaacaagctactgccgaaggggcccgcccacagaagggtggtggccacggtccaggctggacacaaccaaaggcggaggacccgtggcccacgaagctcatctttgaactgtccccgccttctcccgccttgacttgtgaccctaggccctttggggcgcctctgacccagctagccagatcccggacccaaaccatgttccctgtgaaggtgaaagtggagaaatcaggtgaggaccctgacgtcgggggcctgtcgggaccatcgggttgacagggtgtggagtcccggtggaagggagtatcgcggaaaggggactgcacgacttttccctgaagcccacctgacaatcgctgtatcaggcagcgagcgttgcctgccaccttcacaccctcccggtgtgcgcttgaagtcgctttgagattgaatggggtggctcgggcaatgacgtgcgtggtaggacatggggaatcctgagccggtaactctgagaagggcccttttctttcctcttttttttaatttaaatttttaaaatatttaaatagagacggagtatcgctatattgcccaggctggtctcgaactcctggtctcaagcgatcctcccgccttagcctcccaaagtgctgagattacaggcgtgagtccccgcgcccagccgagaagttctcttttcttggcttcccctcagtttccccatttccagcagtgatcagagtcacacatcttgctgtgagcctgaagtacaggcactcttaatcctcacagtcactatattccagtaatcctagaaaataggaactgtggtcaatgggtgaagcttagaaagaggagagaattttgggttggggcggagctgaccggatcccaggcctggcatggtaagggcagtgggaggggtgcagaatttagacagaaagataatagtaaaatgatgtaggatgtcccatggcaaaagtgttattaaaacaaagtgggaggctgggtgcggtggctcacacctgtaatcccaacactttgggaggccgaggctggcagatcacttgaggtcaggagtttgagaccagcctgggcaacatagcgaaacgctgtctctataaaaaatacaaaaaaaaaaaaaaaattagccaggtgtggtggcacaagcctgtagtcccagctactcaggaggctgaggcaggaggatcgctggagccggggaggcggaggttgcagtgagctgagatcacaccactgcactccagcctgggtgatagattgagaccctgtctcaaaaaaaaaaaaaaagaaaggaaaagaaaagaaagaaagaaaagagaagtgggtgtgaccacaaatgatggtgagggaaggtgtacacctgtgagtgccaggctgaggagtgcagactccacccctgggtgctgtggagtcatggaagtttccaagcaagggaagatcagggtcaggtttgttatttttcaggaagattcccctggctgccttgtggagggtgtatcagaagggggacactgaggcagggagccaagggggagcaaaggacaggaccaggatgggtagagtagggaggaggtgggtgggagagacactcgggaggcctagtggacaggccatggggttggtgggctgggtaggggagggagaggggtatccatggtgaggtacagggagggacttggggacagtgaggcgacccttgagagggaggcttcaggcccaagtcgggggttcaggagagaggctgggcctgaggagagttgtggacgtgatccgtaccctctgcatctgcccaaggctttgctgcaatctcagctactcccttccccaccctcactctgtctctcctctgagctatgtttgaatccctgtgtctcctgggcttctcaggaagtccctggactggtcaggcaagttcccaggtgtcccctccaggctctgagcactagagccagagctcccaccagtcagaaaggcagagcaaacacctctcaaaggtaggaggacagcgtaacatcatcacttcctcaagttctgtgatgacgggaggcagccacaggctaactgggcaggaaggtgggcctagatctcatttcccgagggggaaaaaaaagcccaaacaggatgttttaggtgaaatctcccaattttggctgggtgcggtggcttctgcctgtaatccagcactttgggaggctgaggcaggtggatcatgaggtcaggagtttgagatcagcctggtcaatatggtgaaaccctgtctgtactaaaaatagaaaaaattagttgaccatggtggcacgcgcctgtagtcccagttctttgggaggctgaggcaggagaatcacttgtactcaggaggcagaggttgcagtgagccgagatcacgccactgcactccagcctgggagacagagcaagactccgtctcaaaaaaaagaaaagaaagaaatctcccaatttttaaatgtcagctcattcagattgaattcagatttaaaattataccactgttggccgggcatggtggctcacgcctgtaagcactttgggagcctgaggccagcagatcactgaggtcaggagtttgagaccagcctggtcaacgtggtaagaccccatctctactaaaaatacaaaaattagccaggcgtggtggcgggcgcctgtaatcccagctatttgggaggctgaggcaggagaatcacttgaacctgggaggtggaggttgcagtgagccaagattatgccactgcattccagcctgggtgacagagcaagactccgtctcacaaaacagaaatacattaattaattaaaataaaattataccactgcctcaaccagattctgcactcaggttgagcctctgtctcataacttcagctttggaaccagacagcctgggttcaaatcatcagctctgcaatttctttgctgtgtgcctttgagcacgtggcctaacatctctgtgcctcagtttcatcatctttaaaataggaataaaaatcatatctatctgagctgggctctatggcatgtgcctatagccccagctacttgggaggctgagacagcaggaccgcttgagcccaggagttcaaaaccggacaacatcgtgatatcctttttcaagaaaaaaaaaaatcacatctacctctaagggttattgtgataattcagtgggttattatttgtaatatatagcatatttaaaccttgccactgggacaggcacagtggctcacacctgtaatcccagcactttgggaagccgagatggctcacctgaatctaggagttcaagaccagcttggtcaatatcattaagactccatctctatacaatttttttgtaataaatttatattatattaaaacacatttttttaaaacccaaaaggctcataaggtaaggtgattggccttacctcctgtcacagagcaatcacgtgggacagctctggaactcagagctctgggcatcactccagccatctctgcctgttgcaccctttcaggctgcctgggcctggctctgagattggccagggcagaggacacgcacgcccttccctggcccagtcagctgcccacctagctggggcctgggagctgactcctgctgggtcctctcttgccccagagctggagatggccaaagcccggaaccaactggatgctgtcttgcagtgtctgctggagaagagtcacatggacaggtaggccagcgtggggtcacagggccgggcaccctggtgggttgggccctctgatcctgggtggattgggtgggaccccacaggctgacttggggaggaaggtgcttaatggggaggctgctcggtgccttccttctctggggccctggaaccctgagctgagagatctcttctgcctctagggagcgtctggatgaggaagctgggaaaacaccctcagacacccacaataagtgagtttttctgattggatttggagttgagagttcgtggttggtaacttctttccttatccaagccctgaccgctcagcccagcgctacctccatcgtggcccggaccactccacctgtacaaagaccctgtggcaggagaagcttaggtccccccgtggttgccacctagacccccatgggtatgggtgggacaaaaggcccaagaggcaagtggggttcatgtgagcatctcaggtttgataccagtatccccagggtgccctctgcagggttttgcacaggcgtttgtctgagggtcaactgtctttccccacagggactgctccatcgcagccactggcaaaaggtaaggtggcagggtcccagccagctgactagaggctcccagctcctaccccagtcctgacactccctctccctacgcaggccatctgcccgcttcccccaccagcggaggaagaagaggagggagatggatgatgggctggctgagggagggccgcagcgatccagtgagtagacagtggccctagagggtcggtaaggagccaagggcctatgcaaggatgctcacacacctcccatccccaccttcccagacacatatgtgatcaagctgttcgaccggagcgtggacttggcccagttcagcgagaacacgccactgtacccaatctgccgcgcctggatgcgcaacagcccctctgtgcgcgagcgtgaatgctctcccagctcacccctgcccccgctgcctgaggatgaggaggtgggatgggtagtgggtcccagcccagcagcctggtgccagggcagtgggtggataggctcaaaggatcctgcccctaagctagtgggatagacagacacaggtccctcacgtgaatcctggatcaggctaggcacacagatgtgcactcttaggttggggtgtggatcagagtccctagggaagacatacgtaaccacctggcctgggagacagggaacagggttaccctggacagttagatgtggacctccaagatcaggggttcccaagagccgaggggctagacaagggtccttagtacagacagaagtggccaccaggccttgaggagcaggggctgggcaggaatggatgggagtctataagccatctgacccagcggggtagacaagggtccccaggacagacatataggacccttcagacatataggactgtcagaaatggacagagcttcctaggtggcacagacgtgaccccctagacaggattccctgaggcaggcagacgcgactccctgggctgacaggtgtagatggagtctctgggctggataggagaagacaggggtccctggggcaggcacacttgacccgctggctggttgaggtgtctgcccttcatacatgcctcctgtctgagtcccttagcgagcccctcatgccatttgttgctgggaaaggcaggagggatgaatgtggattcccagcccctctgctttgactctcttgggcctggcatggggcccttgtgtccccagggctcagaggtaaccaacagcaagagtcgtgatgtgtacaagctgccgccacccacacccccggggccacccggagatgcctgcagatcccgcatcccatctccactgcagcctgagatgcagggcacccctgacgatgaggtgagtatgccaggctggcccagggttatggggcacatgcggtagggctcaggaatggccactcaacctggcctgtctgtccatgcagccctctgagcccgagccctcaccctccacactcatctatcgcaacatgcagcgctggaaacgcatccgccagaggtgagcgtcccccagcctgcttgcccctcgtagggccctttgcaactgctgagtctcccctctgcctccccaggtggaaggaggcctctcatcggaaccagcttcgttactcagaaagcatgaagatcctacgagagatgtacgaacgacagtgatgttcccaggtccccccacaccagtaaacatcccccagctccacactggtgtctgctccggtccctccttcctggcccaggcacaaagcagttggcagagctctagcacatttattgggagagtaagcctgggaaagactaagggagtggtggcagggagaaaggctgtggggaatcagagcgggtgctcagttgggtcttgaaggagaagaggaggagggtgggaggtgggttgccgaggatatctggttgaagacttgggggtcaagacaaagggacttagggggatggggtctggttagagttggggagggggcctaggacatccgtgcagagtctggggaggttggggtgggagagtctgtacagtttggtgttgggtgttctagttggcctggtgtccaagagttggggcagtcgaaaaagggttccagagtctggtgtggctggctggggtttcacggcagaaaatgggctggagggggcagttgtagactgtctggttgcaggggaaggatcgggtcttgggaaccaggcctggatggtctggagtgggaggtctgtgcagtccaggacgtttggggggtggggggattgtgcctgactggcctggggttgggggagggctgtctacaccataatttggtgtcaaaatagggaagggatggaaatgtagtacccggatgtctttgtagaggactcagaaggaagtagaggaggggtcttaagtggggctatatgccaagaaagtgggtcggtggggctgagactgtcggctgagggttagggtagtgctggtagggtctggaagccggggagttgtcggtgtggggtcggaaagctggagggggtgtgagagcgagggtgtcagtggaagggtctatgttatcaaggcagtgtccaggatggaggtcagggcagaatccaggagtgggtgagaggacagtccttggcgcactcgggacatctggctgggcggagtcagatcggctttaatagagggagcctgaggaggctcccggggtgcgggcgcggcccagccccctcctacttggctgcggctggcggtggggcctgggccgacgctggtgcggcctggatggacaggacgccctcgggggacagcgcggacgtcacggcagccggatccacgccaggcggcaggcggtagcgacggtggaactcgcgcgcgacgaatccgtgctcatcctggaggggagggaggcttgagcggccccgcccctccggcccggcggcgagcgtacccgctccagccccgccccacgccgcggctcaccgggcgctcctcgtggcgcgcgtgcacctccacgtgttcgcccaccaccttgacagcaatttcctccggcgagaagtgcttcacgtctagcagcaccgaaaagtggccggggtccgtcggcacctgagcgcagcgggcgcgggcgggactgtcattgggctgggccaggctccaggacccacccagggagaccccacccccgtcggttccgtgccgcggctcactctggcctccggagttgagcagtcagctctcctactgggagtcacccaggacctcttcaccctgaacaacagggatacgccctccccctgtaatatctgggattgccctctcccccgcagtgatgaggctcccttcccctgcaaggtcaggaacctctgccctcccccggtgtcagcgaatccgaagtcatcgtgccccccagggcactgattccccagctccctcctcagagccccgggtcccttctccgccagccccgccaaactcgccaagatgcccctttccccgtctccagggtcctctgcctactctcccactcgagtcacgggacctcggcagctactggtagccttcccccacttcagagtggccgggaacccttcctcaagtcgcagggccctctcccctcctcttctggagatatcgggccaccgcacacagtctctcaactcttccccgagactaagaacattccttcccctcaggagtcactgcccgcctccttttccccagatttcccggatcaccagcctccttcagagtaagcaagactccccttagagtgacccaggccttccattctctggagagctgagagccccccaccccgccccccacctaagagcgacggggacctcccacccgctgcagtgtgcgggcctcagattcccattgactccggaagcccttcggagctgcggactctccaccccgcccaaggccaacgaacattctctcacatgttcccaccccaggctgccccagacccctggcaatggaagtggtcgagttcacccctccccaggcctggcacctgggcgacgggcagcgccacgctgggtgcgcgcaggtagtagggggcgagcgtggtggggcagagcgcagccagctcggcctccagcagcccctcgccgaagcgctggtcaaagaggcgtccgggcgccgaaagtccgggcaacggggccgaggcgcggcgcagccaagacggctgcacaggcacagggatctccatcctgctcctccgcgttgcagtgcccctgcgtgcgcagccgctcatttatagtgcgccctgtgccggcccctcggagggctgcccagggacactgggaccgtggccagacccggccattaggagagccttatttagaaacccaaacaatgacttggccatttattaagcgcctgctggatgcctggcaaatgctgtcaagaaggtgacatgaagattccccaatttccagaagaggaaactaaggctgaggagggggagccttgcgggtgtggggagcacagcgtggtgattggggcccaggacccaagaggcccacggaagagtttccagtccctttaatccactgcctcccccctggcagctctgaggatgacgcagatggaggtctttaggagcagattcctggagaatgcggtagccccgccaggatgtcaggaggacatagaacaggccctccctacccttatcctcagccagaccttgggcccagtcccccggcaggccgggcctaattctgtgcctctgactcagcctctggtgcgcagaggccagggggcgcgagcatgaacagttcaggctggccccccgggggccgcgcgctggggctggaaatagctcattttgatcccgctacctcggccaggagcccagacctggcaactgatgcaaccagctgctcctgcagcaagaaagaagttagatgaccgttgggacggactgattggcccaactgatggaggaatagcggttagagagagggcagagcgcgccccccccccaacccgccccactgcccctgcaacagaaagaatggtagttagaccggggtcgggacaggacttctgcagcaagaaggcgcttaaaaagcgggacttttaagcgagggtactttagatcacctcctaaccgcaagcccagcctcagatccttcccattggtgcacggtcttgccaattactgctacactcggcaggttctccaatcaaacacgccctgtcgggcaggcagtcgtcccagccaatcctgaaacacctccctccgggtacttctgtttcctctctttcattggtcgccttggaggccgctcgcctccggcgcgggcacagagaggggcggggctgatagggcgttgctaagcgacggagatgcgcgcggggcctgttgggtgaaggagcagagcggccggaagcgcggagggagccgcgggatggaccgcaggtgaggccgatcgctcttccagggactacaggaggctggggaggaccaacggcgagagcagcacagcctaggacgggctggatacggtctggagtcgctagggctccaccgcactggaactacaattcccaacatgctccacagccgttggcctctccagccgtagccgttagcatcccgggggtcccctaagagtcttatgttcctctctgagtgggccccaaggaattattgcctctaaaggtgtccaagaaaggcttgagatctgaatttcttcattttgaaatggcccccagacacgcctgggcgttgtctttgaactttctcgcggaggcggagcccagtggatcctggggcttgtagtccatctaccctttgccttcgtgtcccccaggaatgtatgggaaatgctcggtgatataatccagccgcggttctttctttctttctttttttttaagacagagtctctcgctctgttggcccagactggagtgcagtggcacaatcttggctactgcaacctctgcccccgggttaaagcaattctcatgcctcagcctcccaggtagctgggactacaggcacctgccaccgcgcctggctaattttttatatttttagtagagacggggtttcgccatgttagta[134 bp omitted]gggacgctgcggaaaagacacggaggcccagccccactaatagatattctgattctgttggtctggaatgggaaccgcgcgcctgtaacgttgaaaagcccctcctagactggatccagggttgagaaccaccggctgtcagttcctgagttgctccctgttaagactgctccaggggcgggctcccaggactcacccttccactgtcgatatcctgaatgtgcaacggtgcttcatggaaatgacagtccgtctcctccaggaatctatgggaattgtctggttctgccctcctctaatgtccccctccccagggctgcggcgaaaccacgtgctgcctgaaccccactttcctcttgcagcctgccagttttctccattcaagatagtccctttggagatgcgcccctgggtcgaagccactactggccatcccagagccagacctggtgtcccaaggtgaggacacccctcaaagagtgctgagtgccagcccagtagcaagagaatgacctttagagggtaggaagacatgtgatgagagatagggatgagagatttaagagacagccccttgtcccctccccacggccctgcccttgtccccctctctaccacctggattccccatctgagcccccatcacactaggttgttatcattacaggatgtgtttcctcccctctggactgagactttgtgtgtgtcctggttcccctgcagggatgacccatgagacctcacactttttcttcttgtgctcttccctgatcttagaccctgagcccatccaggtctcagagatccaggctcccacaagctcccaaggctctagccacaggtcccaactcccctgagctgtttgaggagtcctggccatccagttcagggaccccctccctgcccagcaccactgagggacagatgtgggcctccccagcacccaccctgattgacagcggggactccgtggtggccaagtaagtaccagcagccctgggggaaaaagaggctttgggttagagggagggagaaggcatgcagtaataatcatcatggccagagctgtttctgcagcactcttttaggaccaggcagtttatgtgtgttaagaactctggtgctagactgcctgagttcaaatcccagctctgtcatttaactctctgtatgatcttggcctcagtttctttatctctttttatttatttatttatttgtttagagacagggtctcgctctgttactcaggctggaggtcagtggtacaatcacagctcactataacctcaaactcctgggctcaagccgtcctcccacctcagcctcctgagttgctgggattacgatgcatgccaccacacccagcaaacctcccaccttggcctccaaaaagtgctgtgattacaggccagacgtaccatgcccagcctcagtttatttatctctaaattgggtgttttgttttgttttgtttttgtttttgtttttttgatggagtttcactcttgttgcccaagttggaatgcagtggcatgatctcggcttactgcaacctctcccttctgggttcaagtgattctcctgcctcagcctcccaagtagctgggattacaggtgcccaccaccacacctggttaattttgtgtatttttagtagagatggggtttcaccatgttggccaggctggtctcaaactcctgacctcaggtgatccacctgcctcagcctcccaaagttctgggattacaggtgtgagccactgccaggcctaaattgggcatattaatagtacacatcccctagggctgttttgagctttcagtgagttactatatataatgatctctagcagtgcttctcacatagtcaccacttagatttgtagaatacaggttcagctgctgtaacaaagagtcccaaattaattatggctgaaacaagatagaatttattcctccctcacctgcagtccaggcagaagccaccagggatgatgtggcaacccgtagttgaggtgtcagggacacaggttacttctgtcttgttgctgtccgaactctaggccgttgccctttccttcatggtgcaaaatggctttcaaccacatcagctttccaaaatcacatttcataccctgtttgtcaagaacttagtcacgtggtcacaaggctacaagggtacctggtaaatatagtccataggagactggctgtgtgcccagctaaaagttacattcctggctgggcacagtgactcattcctgtaatcccagcactttgggaagccaaagtggcaggatcccttaagcccaggagttcctgaccagcctgggcaacatggcaagaccccgtttctactaaaaatacaaaaattggcagggctgcagtggctcacgcctgtaattccagcactttgggaggccaaagtgggtggatcacctgagatcaggagtttgagaccagcctgaccaacatggtgaaactccgtctctaccaaattagccgggcgtggtggtgcatgcctgtaatcccagtgacttgggaggctgaggcagaagaatcacttgaaccaggaggcagaggttgcagtgagccaagatcacgccattgcactctaacctgggcaacaagagcaaaactccgtctcaaaaaataaactaattaattacaaataaataaataaataaaaatacaaaaagtagccgagtgtggtggcatgcacctgtgtcccagctacccaggaggctgaggagagaggatttcttgagcccaggagttgggggctgcagtgagctatgattgcaccactgccctccagcctgggtgacagagcgagaccctgtctcaaaaacagttatgtgactatataagaaagaaaagcagatattgagggatagctaccaggctctgccatggtgcttggtaaacgttggctgctataattattcttattattatttggctctcctcactccactcacctcctatcccctgatgttcacaggtatataaacaggttccgccaggctcagcccaccagtcgagaggagcgccagcctgcaggcccaaccccagctgacttttggtggctgcagtctgactctccagaccccagcagtcaaagtgcagcaggtacctctttcagtgccatccactactcccacccctaaacctttgctgatcaatgcccccagcagccactcctcctggccctcatacctcaactggggcttctcagcaggagccaacaaaccagaaggaagaccccatacagctgtccctactgcggtcaacgtgaccagtgcatcccatgctgtggctccccttcaggaaataaagcaggtgacatccccattcactccctcccttgggtgcctgaactgacaacaccagccctaggacagaattagaagatcaggagcagtggctcacacctgtaatcccagcactttgggaggccaaggtgagaggactgcttgaggccaggagttcaagaccagcttgggtgacatggtgagattctgcctctactaaaaaaaaaaaaaaaaagagagagagagagagaaccaggtgtggtggtatgtacctgtaatcccagctacttgagagcctgaggctggaggatggcttgagcctaggagttcaaggctgctgtgagctatgatcatgccactgcactccagcctgggcagtagagcaagaccctgtctctatttaaaaaaaaaaaaaaaaaaaaagcctgggcaccgtggctcatgcctataatcccagcactttggtaggctgaggcaggcagatcacgaggtcaggagttcaggaccagcctgaccaacatggtgaaaccccgtctctactaaaaatacaaaaattagccgggcgtggtggtacacacctgtaatcccagctactcaggagcctgaggcaggagaattgcttgaacccgggagacggaggttgcagtgagccaagatagcgccagcgcactccagcctggcgacagcaagactccatctcaaaaaaaaaaaaaaaagaattagagctgatccccatttcaaggaagctaaaacagaaaaggaggatttgctggctaatgtaattgagaaatccaaaagtagatgtttccagatatgcctggatccaggtgtttgaataatgttgggagagacccaactctctctgggctccatgcccccccttttttttttgatacagagtcttgctctgtcacccaggctggggtacagtggcgccatctcagctcactgcaacctccgcctctcggggtcaagcaattcttctgcctcagcctcctgagtagctgggactacaggtgcatgccaccacacccagctaatttttttgtatttttttagtagagatgggatttcaccgtgttgcccaggcttgtctcgaactcctgacctccggcaatccgcccacctcagcctcccaaagtgctaggattataggcgtgaaccaccaagcccggccttttttttttttttttgagacggagtcttgtgctgtcatccaggctggagtgcagtggcgcgatctcggctcactgcaaaccccgcctcccaggttcacgccattctcctgcctcagcctcccgagtagctgggactacaggtgcctgccaccacgcccggctaatttttttttgtatttttagtagagatggggtttcaccatgttagccaggatggtctccatctcctgaccttgtgatccacccacctcggcctcccaaagtgctaggattacaggcatgagccaccgcgcccggccttctttttttttttttttaattagatagggtcttactcttaggctggagtgcagtggcacaatcatggctcactgcagccttgaactctttgcaaccttcgcctcctgagtacctgggactacagcatgcgccaccatgcccagctaattttttggtttttttgtagagatgggatcttactttgttgtcgaggctggtctcgaagtcctgggctcaagcaatcttcctgcctcggcctcctaaagtgctgggattgcaggcgtgagccaccacgcccgcctctgtgcttctctttttttgggctcagtcccaggcgggctttcccctcacaatagccaggatggtccttggggtctctaggctcccatggtcctggctcagtgactccagtgggaagtgggggcttttcgaattgctccatcagaagccccagggctcactgtgattcactcatccttgagccaaccactgtgaaccagaggatagaatgctctgatgaagcagctctgatctgggaggtgggat[133 bp omitted]tgaccaacatggagaagccctgtctctactaaaaatacaaaattagccgagcgtggtggcgcatgcctgtaatcccaggtacttgggaggctgaggcaggagaattgcttgaacccaggagatggaggttgctgtgagccgagatcgtgccattgcactccagcctgggcaacaagtgaaattcaatctcaaaaaaaaaaagaaaaaaaaaaaggtgctaatccaaaggggaaaactgggtctctcctccctgaggaggaggagcagatcctaagctggcatgtgaggttaccaagggcagtacaacctgcattccaggccctctgtttagaacccccttcccagcagcctttgggttggggctggcgtctgaccctgtcaccctgcagaacctccacacatggaactcatccctgctggacctggagacgctgagcctacagagcagagctgccaggctgctcaaacgcaggtgcccgcacccctgcccccatcacccttcctactgcggctccacgtggcccaggtctcgagacctccattgcctcactcctgccttctccctgcagcaaagcctccatctcctcctcctcctccctcagccccagcgatgccagcacttcctcattccccaccagctctgatggcctctctcccttctcggagaccttcatccctgactccagcaagggccttggccccagggcacccggtaagggctgagaggcaaagactgagggcagcctgggtgcaaatcccaactctgccactgaccagctatgggactttgggcctctctgggccttgtttctccagctgtaaaacagggataaggccagatgaggtgggtcaggcatggaggccgaggcgggcagattgcctgagctcaggagtttgagaccagcctggccaatgtggcgaaacccggtatctactaaaaatacaaaaattagccacgcgtggtacataatggtgcatagtggtgcatgcctgtagtcttagctactcagtaggctgaggcaggagaatcacttgaacctgggaggcggaggttgcagtgagccgagattgcgccattgcactccagcttgggcgacagagagagactccatctcaaaaataaataaataaatggtgccatcatagtccaattgctgggctcaagcaatcctataacctcagcctcctgagtagctgggactacaggcatgcaccactatgcccagctaattgtttttatttttttatttgttgagatgagggtctcactatgttgctcaggctgatctcaaactcctgggctcaagcgatccccccaccgccttcgcttcccaaagcactagggttataagaatgggccattcgttatgcccagctggttgttgcagttttgaatagggaagccagggaaggtgaccaagatctgatggatgtgagagaatgcaccgtgcgatacatgaaggaagagcattccaggcagagggaacgacaggtgtaaaaggcaaagccttcgccttttaccgggagagaggtgcagccaagggagggttcttaagtacgagaggcctggtctgactcaggtattcacaggctccctctggctgagagtagggaacagatttggaggagagtagagagaccagggaggctatttaagagtccaggttgggtgagtggggctggagcagggtgagggctgtagcgggtgggggagtgggtagattctggggaatatgtcttctggtcactgctgtaactccagtgtccagaacggctcaataaatatttgttgaatgaaaccaggcactgtgactcacgcctataatcccagcactttgggaggcccaggtgggatgatgatggcttgagcccaggagtttgagaccagcttgggcaacaaagcaagaccctgtctctacaaaaaaataaaaattacccccgtgtggtggcacacgccttttgtcccagctactcaggaggttaaggcaggaggatcgcctgagcccaggaggtcgagactgcagtgatcgcaccactgccctccagcctgggtgacagaacaagactatatatatataatgaacaaagacttgaatgatgacagatggagaagaccaggagtgctcgctcccctgactttgaccccttcccctcttcccaccccagagaggagctgggacagtatctggagagcctgtctgagtaaccccctgcacagttggagggcgtgtgtgcaggctgtcctggggttgctgatctccctggcccctgcctcaccctctcctctctacctccccctacagcatccccggcaccagcccaggcccagacccccacccctgctccagccccagcctcctcccaagcaccccttcggccagaggatgacattctgtaccagtggcggcagcggcggaagcttgaacaggctcagggaagcaagggtgacagagcttgggtgccgcctctgacccctgccctccgcacgttggtgagccgagggagggaggagcctggggggagctggaggaggggctgggtctgagggggactgaggaccctccaccctctctctctctgtctcagatctctcttatctgtctacagacctctcctgctccagtggagaccctcagttctctggggacccagcctaaccatgtcccactgtggagcagtgtggcccagcctggtccaccagaggccttctatgtggagaggcctccttttccctcagtgtcctctccacacatcttttgggcccccagctcccacgggttcttctgggccccacagtctgggccttgggtatcccttggggctgttcctcccacgcagcaggcctccaccctagcacatctgggctctaccctcgcgcccccggcttccctggcctccaccctcgaacccccggcctccaccccagctcccctggcctccacccttgcacccccagcctccaccccggctcccctggcctgtacccctgcacctccagcctccaccctcgcatccccagctgtcccccagggcctgcccatccctgacccaagcagctgtgcccagcctaagagcctggggcccaagtctcggaggagcagagcccctcgcccagaggctgccgagcaagtccctgcagctggccagggacctggccctcagctcaggggtgtcctgggccaggtagtggcagctcggctgttccctgacagcctggaggacacgcctcctcacttcgagggcccccctccacccaaggctggatctccgaaagtccaggccacacaaccccaaaccaaggtcactccccctccatctgaatcccagtgtcgggccaaggccgagtctctgaaagccaaggccttgccgcccgcagcggggtcagtgatacggaagagcgaagccactccttcccctggagcctgcctgcagcccgaggtcccactctctccagctgagcaggcaaccacagtcaaggcctcgccgccagccttccaggtggggtctccggaggccctggccccgcccccgcccgctgctgaccacgccccctcggaggccctgcttgcccaggccgccctgctgctgcaggctgcagaaggtgatgcccgcgccctcctggatgttggaggcaggccagccccctaagaggccggccccttggagctcattcttttctccccggcccagactccgacggcagcgagttccaggacgatcccgtgctgcaggtgctaagagcccatagggcagagctgagtcggcagaaaaggtgaccgaccctccatccccagagtctatgacactgggccccggagacctctgagacccggttaggcatccagccctcctcatcccctgtcccagcagtccgtccacagccccagattctaagcctgagcacataccccagcctctgctctcccggcctttctccagggaagcggatgcccgattatcgttcctgttggaccaggctgaagacctgggatcttggtcccctccagccgggtcgccccctaggtccccaaggaggctgctaagaagggaaggagattccctggaggccagaagactttgaattgtacagattctattttacccagtgaggctctttttttttttttcatacagttactggttatctgtgagaaaggggttgtttggaaaggccaaggggtcatgccaatttaaggaaatgccccccatcctccgctgccccatggctctgccctgccccccaccccttcctgaccacggaaacaagatctcctttctggttatatcttccttggggcagagggagtttcagacaagacttctggcaagactgggacccaccttatctggcttcactcaggagccctggctcaaatggaccaaaggactgccctccacggaggaagctactagggtcatcagagtgttggatgatggtcaggctatagcccacacatgcttgagcagcagcagcatctggtgcagctgacccctccctccttgaagcactttctctccctgcttccagcccttctctctgcacctctctggtcaggcctagtcactagcccagcatgtcaactttggcatgacccagggccatggcgttgacatctctatctgcacccacccataggtgctcttgtctagcttaatgactctaaaccccgtctctattctgataatcctcaaatttctgtctgtaacctagacctggccacgaaaccttgggctcctacctcattaccatttctacccaagggtttaaaagacatctcaaattccataggtcctaaatggagtttccaatctttccccctaggcgtgcctctccccagcttctttttttttttttttttggatggagtctagctctgtcacccaggctggagtgccatagtgtgatctcggctcactgcaagcttcgcctcccgggttcacgccattctcctgcctcagcctcccgagtagctgggactacaggtgcccgccaccacggtcggctaattttttttgtatttttagtagagacggggtttcactgtgttagccaggatggtcttggtctcctgacctcgtgatccacccgcctcggcctcccaaagtgctgggattgcaggcgtgagccaccgtgctgggccccccctccccaactttcttcggctctgtcctttgccgctcagaccaaaaaccttagagttgtctttgacttctgtctttcccttccacccacagttaaccaggaaatcctgccatctccgcctttattttattttattttttgagatggagtttcacccttgttgcccaggctgtagtacaatggcatgatctcggctcacggcaacctccacctcccgggttcaagcgattctcctgcctcagccttctgagtagctgggattacaggcacctgccaccacgcccagctaattttctttgtttgtttgtttgttttgagacagagtcttgctctgtcccccaggctggagggcagtggcacgatctcggctcactgcaacctctgccttgcaggttcaagctattcttctgcctcagcctccctagtagctgggactacaggcgtgtgccaccacgcctggctaatttttgtatttttagtagagacggggtttcaccatattggccaggctggtctcaaactcatgacctcgtgatcctcctgcctcagcctcccaaagcgctgggattacaggcatgagccatcatgcctggcaattttttgtatttttagtagagacgaggtttcaccatgttggccaggctggtctcgaactcctaacctcaggtgtcccacccacctcagcctcccaaagtgctaggattacagatgtgagccaccgcacctggcctccacctttaaaatctatccagaattcaactgcttctccccttctactgctcacacctcaatctaggctgtcatcacctcctctctggactgttggaaaacttaacggtttttataaacctgatattctttgacacacttgccatcaagaggcagagtctatgtcccttcatcttgaaactgggcccctcaacaaataaaatgcagaggaagtgatgc[138 bp omitted]atggtgaaatgtctctactaaaaatacaaaaattggccaggcattggtggtgggtgcctgtaatcccagctactcaggaggctgaggcaagagaattgcttgaactcagaaggcagaggttgcagtggaaaaaaaaaaaaagataatttctctctctttctctctctctctgacacttgctttagaggctacattaaaaaaaaaaactagttgccatgctggggaggggtttgggttacacaggtgtatgcacttatgaaacttagtgaagtgtgtgaatttcattgtatgtaaagtttacctcaaaagaaaatattgaacgccagttaaagatacgcctgtaatctgacttctttgggaggccaaggcgggaggatcacttgaggccaggagtttgagactaccctgggcaacacagcaagacctgtctctacaaaaataaataagtaaataaatagccagatgtggtggcacacgatttgcagtcccattactaggggcggggaggggcgctgaggcaggaggtttacttgagcccaggagttcaaggctgtattgtagtgaactaagatcatgccactgcactccagcctgggctacagagctagaccctgtctttaaaaaaaagaaaagaaaaaaaaaagtatgtacactgaaatatttagggaacaataaaccaatgtcgacaatttattttgaaatgcatccagagatgagttggattgatggataaatagtgtaataggtagatgtgagataaagcaaatacagcaaagtgttcatggtaggatctaagtggcggatatgcgggtgtccactgtaaaatttttcaactttgctgtaatttagaaacttttcatggccgggcgcggtgactcatgcctgtaatcccagcactttgggaggccaaggcgggcggatcacgaggtcaggagatcgagaccatcctggctaacacggtgaaaccccgtctctactaaaaatacaaaaaattagccgggcgtggtggcgggcgcctgtagccccagctactcggaaggctgaggcaggagaatcacttgaacctgggaggcagagcttgcagtgagccgagattgcgccactgcactccagcctgggtgacagagcgagactccgtctcagaaaagaaacttttcataataaaatgatggagaatatatgattggggttgttttgatatctgcatttacaaaatggagggataagatggatttctagtaacttctgtatgtcacatggtaaatataatatttgttttcaacctttctttctttctttttttttttttttttttttgagatggagtcttgctctgtcacccaggctggagtgtagtggtgcaacctcggctcactgtaacctctgccttccaggttcaagtgattctccttcctcagctttccgagtagttgagattataggtgcatgccacctcacctggctaatttgtgtgtgtgtgtgtgtttttagtagagacagggtttcaccatgttggtctggctggtctcgaactcctgacctcatgatccacctgccccggcctcccaaagtgctgggattacaggtgtgaggcaccgcacccggcctgtttctaacctttctaagcaaaccatacatttaaatgaaatcagagtgggcacagtggcacaggcctgtaatctcagcactttgggaggccaaggcgagcagatcacttgaggtcacgagttagagaccagcctgggcaatatagtgaaactctgtctccactaaaaattagctgggcctggtggcgggtgcctgtagtcccaggtgctcaggaggctgaggcaggagaattgcttgaacatgggaggcggaggctgcagtgagttgagatggtgccactgcacttcagcctgggcaacagagtgagactccatctcaaaaacaaacaaactaacaaaaaaatgtaattgacaagaaaaatagctgtttagatataaggagaaataaaagatactatagtagcagaacctgatctagctgggtcacgggtggggtctagaagcattcctgaggaagttacacttaagctgagacaggtagaaattatctagttaacaaagggctgtcctaattactctagttggataaccgctcccaaaacttagtggcataaaacaattattttattatgctcatggattctgagagtcagaggtttggacagggctcatatggggacaatttttgtctcctccatgatgtctggggattcacctggaaagactcaaaggtgacttgatagacttgatggctgtggagtagaatcctccagaacttcttccgtggtcttctcccagtctgactgggactattgactaatgcctatacatagctccattggcctgggcttcctcaaagcatgtctgcttcagcatagtcacacttcgcatatgatgcaccatggttctacagctcattccagtggacgagaacattggtcaagaagctgcattgcctttcatcacatagccttagaaatcaccgtgtcacttccactgttttctattggttgaagctatcctagtcccacccagattcatagaaagcaatcatagagtccgcgtcttgataagaagagtgtcagagaatttgcagctgttttaaaatcactgcaggaccccattctccatgatgtgattattacacattgcatgcctgtatcaaaacatctcatgtgccccctcaatatatatacctaaatatacctgttatgtacccagaaaaattaaaaaataaaaaaaaaaatcactgcaggggttgatggggaaacactagacagaaggaatatcgtgtgggaaatccctgtgatgagagtgaggtcagcaaatttagtacataagtaactgcacattcacctctccctcagcactccctttcaccagcccttgcttaattattctccatagaatgaatcaccttctaatattttttttttttttcagacagagtcttgctctgtctcccaggctggagtgcagtggcaaaatctcggctgactgcaacctccgcctcctgggttcaagcaattctcctgtctcaggctcctgagtagctgggattacaggcacacgccaccacacctggctaattttaatatttgtatttttagtagagacggggtttcagcatattggccaggctggtctcgaactcctgaccttgtgatcctcccgcctcggcctcccaaagtgctggggttacaggcgtgagccactgtccccagctttttttttttttttttttttttttttttgagacagagtctcacttcaacacctaagctggagtgcagtggcgcgatctcggctcacagcaaactctgccacctgggttcaacccattgtcttgcctcagcctcccaggtagctgggattacaggcacgcccgccgccacacctggctaatttttgtatttttagtagagacggggtttctccatgctggccatgctggtgtcgaactcctgacctcaagtgatctgcccgcctcggcctcccaaagtgttgggattacaggcgtgagccaccacgcctggcctaatattctatattttgtttaatgttaattttgttcattgtcttctcccagtagcttttgagctccaatgtgggcagggtatattttctcctggtttggttgttgatgtatgtacaaattgattagagtttgagtgaatgaatgaatgaatgaatgaatgaacagaccaagaccctctgagatgagaatttgttgagggcatgactaaggagagaccctcctgtgaagggcgttattacagtgttatctgggcatgctcagtattagcaggctccattgggaatggctttatggggggcataagcatgatctggcatttccccctaagcattttcctagaaaaaaaaaatcaaggctggagattggcccgtaataagcagtagaaggggaaacaagaaaatgtccagtgggcaggggaggccaaatcgcagaaagcctcgggttacgtcctaggcaaggtatatgaggcaacgagaaacgtccatgggcggagcgtcctcggcattatgtgagcggggtcgggatcaggactgaaaaggtgagacttgggactgggactttgaaaagctgcttaaggaactgggcactgctctgaggccgtgggagaatccaattaagactatcaggggctggctggcgtggtggctcacgcctgtcatcccagcgctttgaaaggaggctgaggagggagtatctcttgagccccagagatcaagaccatcctgggtaacatagtgagacccccatgtctaaaaaaaattagccaggcgtggtagcgcacgcctgtagtcccagctacatgggaggtatcgcttgagcccaggaggttgaggctgcagtaagccacgattgcaggactgcgctccagcctgggcgacagagtgagaccctgtctcttaaagaaataaaaataaaaaagtcagaagaatggacactgggagtggacgaaaggtagggtccattgcttggtgttggaagtgtcggaagcaaagcataaagaacctgggggcttgtctcaggagggcgatgacagccaatgaaaagcagtcatgggcgtggcgctgtcaaacttcgaggggcgggaccgaggacacagagccggggcggagcccaaggtgaaaccaatgagaagcctccgggtgggcggggcatcggcctaaggccaagggcggagccaatgagaagcagcgccgcgttcccgctgccccccgcccccgtggggcgcgcgccggagccacgggcagccgttaggggcggggtctgcagccgcccgcgcgcggctcgcgccctcccctttgtgtcgccatggcggcggcagcggcgacgagaacggcgagcgaggggtcgagcgcggccggggcctgaggaggctacgcgaccatggtggtaagggtcccacgcggccgtcagcctgtccgtccggatgtcagtctgtccgtgcgcagccccgccccgcgcgccccgcccccggccccgcccgatcccgcggcctgtgcttcagccgtggtccctcccgtcctgcggccccatcccgggtcccagcccgtacctcgaccccgccccctaagcgcgcatccccgtcttccacgccctggatggggtgacagggacctagggcctgggctgggaggaggcggggctagtccaggaagggacccgcgccacccaagtggcccctgcaggggcctcctgaggctcctgggtccttccccagctcccatcccagcaccttcctcggcatccttctgccagccctcagccctccccggcggagccccctcctcctccccacagcccctttctcattcccgagccccaccccccacccgctccatccccagcctgacccttttcttctccttctccctcattttcaccctatcccagttcctctcaatcccccccgccccgcatcagtctgagcctttgcctcgtctctccagccactccttccttactccaccccaacaggccagcactgtacctcccttgatcctcgggtctgctccatctccttgtcctcatccccctcccccaccatttccctctcccaccatgctgctcccgctcattcatccattcattccctcacttagcagacattcactgagaccgcctctgtgcaggccccacgctccaggcacagagagagtcagctcccatcctgccttggggaaccttatgggctggagggggacagaccctgagggtgagaccctgagggtgactgggggttgcagggacatggagcagggagacgctacagcccagtgaatctgtctggcagctggttaatttattcatcagattttacccagtccctgctgcgcgcgactgggctggcactggggacccagaaaagaatcaggaacaatcatgtctgaacaccaactcaatgcccagctctatgctggggagctcagtctggggccctccttctgggaggccggtcatagtccaatgagagagatgaacttgtcaccaccagtgccatctcagagtgatcagagctgtgaagggagaagctctggtcaaggcatggaacctgggatgggggaacctcaggggatggagagagtccagaggagatgccaggtgcagcctgaagggtcagggagaacttcctggaggagggcacatgtgagttgggacctgaggggtgggagtgaggatgaatgtacccagggaaaggtggggcgagtgttccaggctgagggaacagcctttgcaaaggcctagaaggaaatgagaagagggtgctttttttggactcttagaagttcaagagctctgagagtgggggcaatgggaagagatgggactggagaggtaaacagaaatcagctcagggaagtctcgattatcagaccagagaattcagacttcgtcttgaagacaacagggagtcattgaaggcccaggatctatggagaaatagagccagatttgtgttttctgaaaacgatccaggctattgcggaaaagctggcaggaggggagaggctggaagcaggaaggctgatgagatgggagttgtgattgtctagacagtggtaggagatcactgtactctgcaggggctacggaagggttttcagcagggagagatgggaccagcatgctctccatcctgttgccccgcctcacgtctggcccctgcttctccagtcccccaccccagaccacacacgaagaagcagtcctgtcctcagcccagccctcacctcccccgacctgccatcctgcttcatgctcagggcggtgtgtggagcgcccggggctctggacccgcgctgccagataacaatgctctcgttgtctctttgctcccatctctgggggcctctgattctttctgctctacaggcacgcagcactgacagcctggatggcccaggggagggctcggtgcagcctctacccactgctggggggcccagtgtgaaggggaagcctgggaagaggtgagggtgagggaggaaagggctcagctaggagctggggagactcaaggagctgctggtgacgcatcccctgtctcccaggctctcagctcctcgaggccccttcccgcggctggctgactgcgcccatttccactacgagaacgttgactttggccacattcaggtatgggggctttgcatttgcacccaggagggaagacaatatcctacccaaccttgcaacgatatcaggtgctttgcttctgaaacttatccctgtgactggctgctgcacgcgtctgagcagtcagtagcaaaagttgcaggagccacagcagatggggagagctgctcattcattcatccatttgttcttttattcattcaacaacaacttttgttaggtatctgctctatgtcagggaccaggacatcaccaggccctgtcctcggggaggtccagaagggagtcacaaacccgtccctagatagtgccatccccaggaggtcaggactgggacaaaagtccacctgggccttgctttccctctgcagctcctgctgtctccagaccgtgaagggcccagcctctctggagagaatgagctggtgttcggggtgcaggtgacctgtcaggtgaggccatcccgcctctcatctagcctgagagaatggccactgtagtcctcagctcggtgtcatggggcccctgctcccttctgtccctctgctcccacagggccgttcctggccggttctccggagttacgatgactttcgttccctggatgcccacctccaccggtgcatatttgaccggaggttctcctgccttccggagcttcccccgccccccgagggtgccagggctgcccaggtaacctgcttgttgtctcagcccctgcctcatgagtgtgtcctcatccacagtgtgaaatcatcaaggcagcgggatagagaaatatttaaatactggtatggcccaagtcccaaccaatctgaatgaatggagaagccttagaaacgtagtaggcttctgctacatttagctttgctaagttttaggatcatggggagttccagggggtcccatgggagggtcaccatggtcatgccaaccagggtactcaagagcttggcccagcctgcttattcattcatatgcccatatctcagtacctaacagctgagcagcacccatgtgttcaggatgaacttcagcccagagacgagctagggcagtgtgggagggcagtgggctctctcacgtccactcacagaggcccactctgacaacctgcccccagatgctggtgccactgctgctgcagtacctggagacactgtcaggactggtggacagtaacctcaactgcgggcctgtgctcacctggatggaggtgggcctgggcagggggcttggagattccgagtgggtgagggggtgtctgaggggcgagaagcagcctcggtgtgtgtgtgggcatagaaaagaaaggagccagagtggaggaggcgttgatattttagtgtctgtgtgggcgcatgcctgtgagagaatgtgtgtgagcatgtgtgtgtgtgcacgtgtgtgtgttagcaggtgttcggctttaaggatacaagggtttaaatgtatatcagttagaaatgggttgggctgtaactcacagaacacctggctatgagtggcttaaaccagaggggttttttttcttttcttgagatggagttttactcttgttgcccaggctggagtgcagtggcatgatctcgcccaccacaacccctgcctcccaggttcaagtgattcttttgcctcagcctcctgagtagctgggattacaggcatgtgccaccacgcccggctaattttatattttcagtagagactgggtttctccatgttggtcagactggtctcaaactcctgacctcaggtgttccgcccacctcagcctcctaaagtgttgggattataggcatgagccactgtgcctggcctctggctaattaaaaaaaaatgttttgtagagacagagttttgctatgttgaccaggctggtcttgaactcctggggtcaagcaattctccaggctcaccctcccaaagtgctgggattacaggcgtgtgccaccacgcccagcacagagagattttagatggcaaccgtgtggcatctgctgtggaggatgaaggtgcagaggtggatggggaagccttcaggtggggaagcctttgggtgggagagtcctgggacatgtgaggggaaataaaggggtttttcttagaggtttccccacccgcagagggtgccagggctgcatccctacaaacaggaatctaggtgtttgaccaatagctctgagtgacaggggctcttgacgggggcgggcagtggcctcacccagcgcggaggagcttggtatgcctgcactaacaccgtcttctgacctgtccttgccacattccacctctatttcagctggacaatcacggccggcgactgctcctcagtgaggaggcgtcactcaatatccctgcagtggcggccgcccatgtgatcaaacggtatacagcccaggcgccagatgagctgtcctttgaggtgaggctgtggggaagcagattccagctgggctccccacaccccctgctccttctgacccttctcttcccacccgccctctcccaggtgggagacattgtctcggtgatcgacatgccacccacagaggatcggagctggtggcggggcaagcgaggcttccaggtgagtccagctgggcgcggacaggtggggctggggtacctgccaactggggtggcccagctactgaccctgaccttcctcaggtcgggttcttccccagtgagtgtgtggaactcttcacagagcggccaggtccgggcctgaaggcgggtaagtgccatggatggatgggaggtgtggggaggggtgggaaggggtggggcctcctgcgtcttttgcctcccactcatcccttccaccccatttttcgcctagcagatgccgatggccccccatgtggcatcccggctccccagggtatctcgtctctgacctcaggtaatagaaataggcggtcaggtcccagcccctaccccaccaggcccctggccatgctgaccccacaagacctgcctttgccctttgccccttgcccccacagctgtgccacggcctcgtgggaagctggccggcctgctccgcaccttcatgcgctcccgcccttctcggcagcggctgcggcagcggggaatcctgcgacagagggtgtttggctgcgatcttggcgagcacctcagcaactcaggccaggatggtgaggccggggcccacccaccccacccgtcacaccagggctgcggcccacccagccctgaccttgctttctcccagtgccccaggtgctgcgctgctgctccgagttcattgaggcccacggggtggtggatgggatctaccggctctcaggcgtgtcttccaacatccagaggcttcggtgagggcccttagccaaccctgtccttccacaggcactcacccagcacctccactccagccccgtgctgcatgctggggacacagttaccaggagtcaggagtggcaggatcaaggctggggtcagggacagctctcttgagagtagagttagcagtctaagcgaggactatcttcaccgagcacctgccacgtgccaggcactgttctaggcactggggacgcagcagtgagtgagacagccagaaacccctgccctcatagggcccatgggctagaggaagagacaaacaggggagggatagagttcaccagaagatgacaggtactatggaggaaaacagattggggtaaggaggatggcgacgaagagccaagagggaggcctgcagttttggatggcaagggcagagccacctcatgcgagggtctggaggaggggaggggcaggccatgcagagggagcagcagggcaaagggaacagcaacaggaggccatggccaaggagtccccgtgccagcgcaggcaaagccttcatgttagggttttggcttttactataagtgaagggggaaccgcaggagggctctgagccggggcggggtctagaggcggggaggagccaggcgagatctcggcctgcaggaggctgagaggggagtgcttgaagcctgcaggggggtggccaagagggaggcaggaggtggcaatgggtgggagattttaccacaggcagtggggccccaccagagaattgggagtagcagggtgctgggattttgtccacattttccagtgccctcttacagccaggagaatggcagctgcatggtaggagctgctcatgctctggagtcagacagtcttgggtagctgcaggcagaggcacctctgtctgagcctcagcatcctcctctgtaaatgcggcacccttctctttgccacacaggcttgctggggagttcagtaaggttctgcctctgaagagcccagtgtaggacctggggaagagggttccatccacctgcgggcacttgggggtaggggcaaggggagcatggccacgtgagcgagcccctctgacctggatcttcctcctccttgacacggtggtctcaggcacgagtttgacagtgagaggatcccggagctgtctggccctgcattcctgcaggacatccacagcgtgtcctccctctgcaagctctacttccgagagcttccgaaccctctgctcacctaccagctctatgggaagttcagtgtgagtaagggagctggcgggacggagggggccgggacgcctctggcccagacctcatcacacctgcccaccatctcaggaggccatgtcagtgcctggggaggaggagcgtctggtgcgggtgcacgatgtcatccagcagctgcccccaccacattacaggtaaaccaggaggggcagggcgggacttggtgggattccaagggggttgaggctcaggtgccccctctgctcccacccccaggaccctggagtacctgctgaggcacctggcccgcatggcgagacacagtgccaacaccagcatgcatgcccgcaacctggccattgtctgggcacccaacctgctacggtgagctgcttgctcgcctgcctgcccctcaggtctttccccaaaaccaccccaggaacccgcccagcttttcttttgtttattcatcgaatacgtgtctatcaaatacctcccatggacctggccccgtccctagcactggggacccagcactgagcatggccctgtcctcctgggactcatgttctcatggaggagatggaccatgaacatcaacaggaaaaatacagagtaaagtctgatggtgatgagtgctgaggaggagagaggaggagggaagggcagtgtgcagggtcagggcagtgtgaagtttttagcgagagtggcaagggaggctttggcaggtcttctgtggccagcagcagaataagcctggaggatttgatggtgaacgagacaggcatgatctctcccctgccggagttcacagtcttctgggggcacagatacataaacaagtaaaacaggtggtatgtcagaggacgggcgtaagatgtacggagaaaaataaacgagaaaggccaggggtacagagaagggagtgtacagttttgaataaagtgggtgaggaagactgcactaagaaggcaatatttgagtcaagacctgcagaggatgagggagggccccaggtgcgcacgtggggagtgacaggctgagggaacggcaggtgcagacatctgggcctgggccggtgcctggtgtgttggaggagctgcagggaggccggtgtggctggagctgagtgagtgaggggctgagggagaggagatgatgaggtcagagaggtgacggggaccagacagaggggtgactcacaggtcatgggtcacagtgaggactttgctcttgcctggagcgaggtgcagccagggcagggctctgagccaggcgggccctgatggaactcaggtggtctcaggctccctctggctgcaggtgggagcatactttagggtggggaccggaaggaggctctgggatgtccaggctgggggagatggaggctgggccagatggggggcagtggagggggtgacagattgattgtgggagttaaagaggggggctcagggcaaccccaaggtgtttggccagagccacaggaagaaccacactgagatggggaaggcaggaggggcgggtctgggggaaggttgagagcccagcgaggcgtgatcagtttgaggtcagaggtgttgaatagacagtcactgcctcccctggctcccctcattgccctgccagaacctgctggctgggctcaaggcacccagcctccctcccgctcctcccacccaggtccatggagctggagtcagtgggaatgggtggcgcggcggcgttccgggaagttcgggtgcagtcggtggtggtggagtttctgctcacccatgtggacgtcctgttcagcgacaccttcacctccgccggcctcgaccctgcaggtatgccctcccaccccctgaggtcctggctactgcccaccacgatcagggctgcagggggagggcaggtgggctcccagtcccgtccccaccccactgaagctgggcctccctccggctccttgaggatcccgccccggcctctccctccccgcgcccccctccttctcatttcagctcctccgctcaggattcccacctcttggcccggacgccgctcttccttcaccccttgtagctcctgggggcgcttggggccatgggtccacctgggaggaggtgggaggtccccagacttgaccccgccccggccccacccagactccccgccctgccccggaccccagcccagtcaggactcagcacgtcggagggccctctggcccgaggtaactgaagccagagccgctgccctcgctggctgccgggagctgcctcctcatcagctcgtcccgccccgccctcctcccacctgcctgctgcccgcctgctcccgcctgatccgccccggccccctgccttgccagcccgggtgggcatgctgcggggccggggcttgggctgtggcgcttggctttgcctgtggccttgggcggccccagagctgacagctgccccctttccacactccccaggccgctgcctgctccccaggcccaagtcccttgcgggcagctgcccctccacccgcctgctgacgctggaggaagcccaggcacgcacccagggccggctggggacgcccacggagcccacaactcccaaggccccggcctcacctgcggaaaggtgagtgggatgctgggggtggcgaggggcaggtggaggcctggttcctcagacggcctcctgtttctcccccaaaccgcaggaggaaaggggagagaggggagaagcagcggaagccagggggcagcagctggaagacgttctttgcactgggccggggccccagtgtccctcgaaagaagcccctgccctggctggggggcacccgtgccccaccgcagccttcaggtgagaggctgagccatgggctggtgggcagcgatggtcgctggagtgccctcctacctctccctctcctgcaggcagcagacccgacaccgtcacactgagatctgccaagagcgaggagtctctgtcatcgcaggccagcggggctggtgagcaaggcgggcaattggggggcgctacctgtgcccatgtggagccgggaggaattggggccctggtttggcctccaaattttatacttcacatttgggggccctggggcttttgaaaaatttaacctggcctttatgtacaatgagttggatacagtatcacctttggttcatcacacactgaacttaacttactcattggtccatgacgggccctttaaaagtctttattattcctgttgaacattttaaaataatatcatggacacccatgaacccagcagccagaactagagcagccccattccttctccccttcgagttcctccccactggaggcatcctctcaatttgcagactaccctgcccttgctttccaggtctgatcatacacaggtgtgtgtgtaaggatcatactgctcagttctagccattttggaaacttgatttaaagggcgttgtaagaaagggatgccgcactgtatggggagcttggctttttctccatcgctacctcacagcccgccgcgctgctgggtgctgctctccgacctctgcggggggctgcttatccaccccacccagccgtgcctctgggggctcttctgagccaccgcgccatcctcacactcctggggtactgccctcccacatacccaggagcccaggtgctgtcctgctggctcagcagctgtatgtgaatctgttggtctcgtgctcacagcctgtggggcagccacagggccttcgtgctttgggccggaagtgtcctcttcatggtctccactgtcaatctgaacagctcttcctggcttcacactactgtggccctctccaggaggcgcctcttcatgtcctttccccagctttctgtggggctgtgcgccctgttctcagggatggtctcactgaccccacccctccaggcctccagaggctgcacaggctgcggcgaccccactccagcagcgacgctttccctgtgggcccagcacctgctggctcctgcgagagcctgtcctcgtcctcctcctccgagtcctcctcctctgagtcctcctcttcctcctctgagtcctcagcagctgggctgggggcactctctgggtctccctcacaccgtacctcagcctggctagatgatggtgatgagctggacttcagcccaccccgctgcctggagggactccgggggctggactttgatcccttaaccttccgctgcagcagccccaccccaggggatcccgcacctcccgccagcccagcaccccccgcccctgcctctgccttcccacccagggtgaccccccaggccatctcgccccgggggcccaccagccccgcctcgcctgctgccctagacatctcagagcccctggctgtatcagtgccacccgctgtcctagaactgctgggggctgggggagcacctgcctcagccaccccaacaccagctctcagccccggccggagcctgcgcccccatctcatacccctgctgctgcgaggagccgaggccccgctgactgacgcctgccagcaggagatgtgcagcaagctccggggagcccagggcccactcggtgagtcctcagcctaccccacccctgtccccgccagctgtcactgactctgagggcctggccccagctgaacccctctccattcatttatataggtcctgatatggagtcaccactgccaccccctcccctgtctctcctgcgccctgggggtgccccacccccgccccctaagaacccagcacgcctcatggccctggccctggctgagcgggctcagcaggtggccgagcaacagagccagcaggagtgtgggggcaccccacctgcttcccaatcccccttccaccgctcgctgtctctggaggtgggcggggagcccctggggacctcagggagtgggccacctcccaactccctagcacacccgggtgcctgggtcccgggacccccaccctacttaccaaggcaacaaagtgatgggagcctgctgaggagccagcggcccatggggacctcaaggaggggactccgaggccctgcccaggtcagtgcccagctcagggcaggtggcgggggcagggatgcgccagaggcagcagcccagtccccatgttctgtcccctcacaggttcctacccccggcttcttctccccagcccccagggagtgcctgccacccttcctcggggtccccaagccaggcttgtaccccctgggccccccatccttccagcccagttccccagccccagtctggaggagctctctgggcccccctgcaccactcgacaggggagagaacctgtactatgagatcggggcaagtgaggggtccccctattctggccccacccgctcctggagtccctttcgctccatgccccccgacaggctcaatgcctcctacggcatgcttggccaatcacccccactccacaggtcccccgacttcctgctcagctacccgccagccccctcctgctttccccctgaccaccttggctactcagccccccagcaccctgctcggcgccctacaccgcctgagcccctctacgtcaacctagctctagggcccaggggtccctcacctgcctcttcctcctcctcttcccctcctgcccacccccgaagccgttcagatcccggtcccccagtcccccgccttccccagaaacaacgggcaccctggggaccccgtacccctcatagggtgccgggtccctggggccctcctgagcctctcctgctctacagggcagccccgccagcctacggaagggggggcgagctccaccgagggtccttgtacagaaatggagggcaaagaggggagggggctggtcccccacccccttaccccactcccagctggtccctccactctgagggccagacccgaagctactgctgagcaccagctgggaggggccgtccttccttcccttcaccctcactggatcttggcccaaccaaatcccttgttttgtattttcttgaaccccgaccactaccccaggtttctaactttgtaacttgcttctgatgtgggtccctaacctataatctcagcttccctaccctggactgaagggtctgcccatccccccaccaccctccatcctgggggccctcgcacaaatctggggtgggaggggctaggctgaccccatcctcctctccctccaggagcccccagcatgtcctgacctgtgcacggggatggggggacaactcctacccttctttccccacatgccccactaaaccatctgacaacattaatgaataaaatggtgaaaatgtggctgctgaagtcgttctggggccaaactcagtgagtgaagacagacagagggggcactttatcattctatttccttttggggaggcaccaaggcaggagttactcctgggagcctctgagaggtggtatctgcagagaggggaaccatgggcaccctgggagtctaggtcaggagtggggctcaggctgggcttttctccaagctgacatcctttttgtagctctgctatgatctcctccagcaggtccatcctggggagcagtgaggcacaggtagacctagggttacctcagggataaagacctagggttacctggggtcctcccatccaaggcctcgggtctcacttctgcaggctggagaagagacctcctctagtcagctcagtaccgggtgcctgcaggagagaaggctggagctgccacctggtagccatggtgctccagcgggcctgggagggcagatggggcacaggctgagctcggggtcctctgcttagcctgccctcgtggccttccctgccagcagcctcccagtgtgtgggaagcctccctgtgggtcagcaggctggggatgggctcacagggctggggctccagcagaataaccctgtgtgtgcgccgcagcagcccctgcagggctggaatcttggctgagagcttcctcaaactgttccgcagagctctgggtccccagcagggaggctgagtcctagaggctggagttggagtgcagggaagggccctgggggaagcagggttggttaagggtcataggtgagtgaggggacagttgggcgaccctaaagttccctggtcaaaggagaggcagccagggaacttcgggttggtgactcctggagggcgggcggagggggtcacaggttagcagtgggacagttgtgcagggctctgggggtatctgtactgttgagctgggctccaggcagcagtgcaggctgaccctggctgtggggctgtggccagacccagggctgggtcctgggctgggcccagagctgctgcctagagtcaagctgctgcccaagttccaggctgcaccccttgggatcctgctgtggtctctgacctcaggagtctcaggcctgcagagaaggatggcagagagctggcatgggttgcccaggtgtcccacagctcccttggtcccccacagccccgtcctggctcctacctggcatgggatggggcctggggacatcacaggggccacaggcctgggtgtggtcttggctctgtgagccacttgatgtacagtttctctgtggggacagaccagttggtcagcacctgccagcatcccttccttgccctctaacttggtggggaaccctggggtgcaggggatagcgtggtccactccattggggagctcacctcaggagccacgtcctgtggaccggaggctgggtgtggggacacaggcttgcctggggtcccatggccaccacccaccccctgctgacctgccctgtacctgggccggggcctcccgcagtaggtatcgggtactctgcaggctgccccagcggtcagcaggtgctaggcctagcccagctcgaatcagggcctggtagggtgctggcacccggggctccagggccggactctcccctgcctccagcttggccttcacctcaggtccccctctcccagcccagggcagctctcctgccaggaagcacagttagggacccaagcgggagggtgccttcatggggtggggcgcagccactcactcaccagtgaagacctcctggatcaggatgcagaagctgtagaggtctgaggtggtggtgggcatgtcaccgcagatcagctgaagtggcagccatgggtgtagttcagggggcgggggaagccctgggcctgggcctccccaggggtagcccttctgctgcctgtggagcccaagggccctggtgagccgacggctgctggacagggacctgcacccgccaccagacaggaaaactgagaccccaggtcacacagcccagcagtggtagggccagcacctagctcctatgccactcacagtgcccctctccacccccacctcctccctggggtctacaagacaccactgcccatggccacggaggctggagaacagggaggaggggagcgtgcaggcccgagtcaaggggcagcaggcagggcaggcactcacctgggccgcagccagcgctggcgtaggaggcgcctgtgctccaggtggcccactttagccaggcctggctgcaccagctacacggtgtgagagctgaagccactgtgagctcgccagtgggcctgcaggaacagcagggcctttagcacctgctgcagcagggggccggggcggcaggcccagcacagtcccaggtgcctcctcacttggtctcggtgggtgcagcaccccctgcagggagcccagccacacaggctcaaagagaaggcacagccccgacagatctgcagagggactcagtgccatcagcagcaacaggccagggtggtgcagcttgctgggcaggaggacagcaggccactcacgagcaggccccagccacacagggtgggagatgctcctgggcccagactgcccaccacgtgccagggcaggcaatctgcacctgccatcagacagaggaaagactgatcccaggtcacgcagcccagcagtgggagggccagcacccaccgcctacctcatcctggtgccttccacacccccacctcctctcaggcctacagggcattgcacacacaactggtacccacccactttccagtggggggatcgccccagcagaagggctccatgccgggtgctggcccagaagtgaagattctggccatgactacggccacacacccttgtcttccgtgggagggccaacaggaggcggggctgggggctggcacaggtacctgcagtgctgaaggtcagccagtagcacatctgtctgggttccaggggccttcggctgctgcacagtcattttgtgacccatccacaggaggctggagaataggggcggggcagtacaggcctgagacgagggggctttccctgggaggggagcaggagagctggcaagggcacagcggggctctcacttggccatgagggtggggagctgctctcataggtgcagtcaggctctccctgggctgccagcagctccttggggtccacaagggggatgcccgttaccagccccggtggccacaggctactcagctagggacaggcaggatcatgaggcacgaagaagacaggggtggttcccactcctacagccactcctgcttacctgaccaaaccccaaggccgggacttgggaggctctcctgatctgtgctagcctcagcatcctggggtgggggcaggccgagggtaagtctggggtggctgggaatggttgggcgggtgggcttcaggatgtggacggttacctgtctgcctgcatcagcctcagggaggacagggagccaggcgggctgttcccaaatctggcctgcaactggtccagagatgccatgggtggcaactcaccgtcatgcacgaacgctgatatgtgggcccggcagagctgcaacaactccagcaactggaggagggcacgtagggtgaggcctgatgggtgccggccctgatccctcactcccaccagggccactgctcacctcccagttctgcttggccccaccctgctcagcccagtcttgtggtgtgcgaccccgctggtcatgcagttgcaagtcaccccctgcctgcagcaggggcaccatcactaaagaaggcgcctgcaggcacgggggtgctgccatccaggcagcggttagagcagaacaacgcggtgggagtcgattagggaagggactgaacagggacaaaaaggggcaggatgggggccctgggggatgggaggagtcaccatgtcatgggaggtgaatatgaggatgggaggggtcacatgagggcaggatggggtctttagggaatggaggatcactacgagcatggaggcactgggagaatgggaacagtcactggggaatgagaaggggttaattgagagaataaggagggttactggggggacaggagggtcaccagggaatggaagaggcatctcgagggagagatgcctcaggggaagagagccctagctctcaggctttctggggctcaaacttgggcccctggggatggggggcatcactggctggccagccactggttgggcttggcaccaaaggccagcaggagctgcatggcagagccgtggcccagcagcgccgagaggaagagcgctgtctgcccctcagagttctccccgtccacctggacacctaaggggcaggcaggcttaggacgccccaggcccatactcctgggttggaggcctgagggccgctaggcaaacacccttgccaattcccatcctccacagcccctccatgactggatgactatggaccccaggttccatctctgtgtcctggaacccctgccctccagctgctgaggaccatgcctcgcaatccacctcaacacagtgctccccaaatcattaagtccacagagttgaaacaaggggtgacatctgcctgctgtgcaaacatctatcccccaacccagggggatcaaaatcacacaaaggtccccatgggccaggaggaagtggatttcaggggactttgacttccaggagccttgcgcactggccgggacaggcggactccacccagctgtgactcagtgtggtacacacaggtcccatgaggccagcactcagcaattcaagtaaagcaaactctggattttatcagatctctcaaattttatttattttaatttttaattttttgtagagatggggtctcattatattgcccaggctggtcttggactcctgggctcaagcagttctcctgccttggtttcccaaagtactgagattacaggcatgagccaccatgcatggtctcaattttatttttgaagcctgcatctaagggctcaatccagttggcaaccccctccatgtccttacctccaggcctccgccaatcccctccccaaccatcttcctgctcagctccccctcccaaccactcactcctgccccaagccctgggtctccaaacccgtcattccccagttcctcttcctccagcccctaccccaggtagagcaaatgcatggtatccttgtccttgcactcctgtgtccttggcagacacggctaattattcatgcactgggcccaacccagcgtggtctctgccacaaaacccctccaaatgtggaccttcaggaatctctgaataccagatttgcggcattgcatttgactcattagctcactatcttttacaacagcatcttaactgcctttctgcactcatcctgccccacagaggcctttttttttttttttttgagacagagtctcaatctgttgcccaggctggagtgcaatggcgcaatttcggctcgctgcaacctccgcctcccaggttcaagtgattctcctgcctcagcctcccaagtagctgggattacaggcgtgtgccactatgccaggctaatttttttttattttagtagattaggggttttgccatgttggccaggctggtcttgaactcctgacctcaggtgatctgcccacctcggcctcccaaagtgttgggattacaggcatgagccactgtgcccggcctttttttttttattttaaagacagagtgttgccaggcatggtggctcacgtctgtaatcccagcactttgggaggctgaggtgggcagatcacctgaggttgggagttcaagaccagcctgatcaacatggagaaaccttgtctctactaaaactacaaaaactagccgggtctggtggcacatgcctataatcccagctacttgggaggctgaagcaggagaatcacttgaacccaggaggcggaggttgcggtgagcagagatcatgccactgcactccagcgtgggcaacaagagtgaaactccgtctcaaataaataaataaataaataaaataaaataaagacggagtctcactgtgtcacccaggctggagtacagtggtgcgatcacagctcactgcagccttgacctcctgggctaaagtgatcctcccacctcagcctcctgagcagctaggactacagcacactccacagcacccggcccgaggtctcttcttaaaacacaaatcacttttaaggactagataatcttatatgagttgttccaaagaaaagaaaaatagaaaaagaaggcaaggctcattttatgaggctagcaggaccttaattccaaaactagatgaaagtttccagaaacagaaagtaagattatatatcaattgcatatatatgcaaaaactttaaataaaatagaatagatttatccccataaagcaaggatgattcaacataagaaaatctatcagctgggtgtggtggctcatgcctgtaatcccaacactttgggaggctgaggcaggtggatcacctgaggtcaagagttcgaaaccccttctctactgaaaattcaaaaaactagccaggtgtagtggtatgcgcctgtaatcccagctactcaggaggctgggacaggcgaatcgcttgaatctgggaggtagaggttgcagtgagcagagattgcaccattgcactccagcccgggtaacaagagtgaaactctgtctcaaaacaaaaaaacaattaaaactagtaagcaagttcagaaagtggcctgaaacacaaccaactttacaaaaatcaaaacagaaattgtacattgttaatttaatgggttattgttttgagacagggtctcactctgttgcccaggctggagtgcagtggcctgatcaaggctcagtgcagccttgaccttttgggctcaagcaatcctccctgctcagcctcccaagtagctgggactacaggcatatgatgccaccactccctggtaatttttttaaaatagagatagggtcttgctatgttgcccaggctggtctcaaactcctggactcaagcaatcctcctgtctcggcttcccaaagtgctgggattataggtgtgagccatgtggaacaggttgcccagcctaatttaatgttaattatgttaatttcctgcttacaatgccaacagtttcctatcacacacacaaaatccaacaaaactcacactcctttagaggcccttaactgtgtggacttgtggccacttcagcctcacgtctctccaagtcctgctgctactcatacatgggcagttcattttgacttcagagcgtttgcacagcctcttccatcactccccacttctttttttttttcttttgagacggggtctcgctctgttgcccaggctggagtgcaatggcacaatctcagctcactgcaacctctgtcttccgggttcaaatgattctcctgcctcagcctcccaagtagttgggattacaggcacatgccaccatgcctggctgatttttgtagttttagtagagacgaggtttcaccatgatggctaggctggtctcaaactcctgacctcaagtgatccgcctgcctcggcctcccaaactgctgggattacaggcatgagccattgcaccccaccatctctccccacttcatttcaccttttttgcgtggctgactcttatactgtaagactcaagcatcctccacctgaaaggccatactgtctagggtctcatcctcatcccactgcatttcattcccaatggtccaagggtcatgttcacccttaaagccccatcagggaccacagagctcgggacacagtcggtgttcggtaccactgctgactggccaactgaagccacaccctccatacagctccttgatcctgccgccacagatgtacctgcagccaggccctcacctctccgcaggagcctggccgggccccatcctgggcccccagccacagccaggtggtgcagacggcccacctgggtgtctagatccctcttggagcccagctccactgggaagcgcgaaagggctgcgagggcatctgtgggctgcggctcagtcggctcctgggcagggatccgctaggggggtctcatcagggaagggggatgtgaaggactggaactttgggcacaacaaaacaatgaagacagagctggctgggggtcctgggggcgcagtctagacgggaacgggatttaggaggggtctgatgggaagggaggtggctgaatgagaaaagggggtggctctgggagggcgacacaccagaaggtctggggtcgcagggaggctgagagctgagggggatctaaggcaatcgggagtctgggagggggcttagggctggggtcgggcgtgccagggtggcagaagggctgcgaggataggatccgagcttgggaaaggagtcggagggctcaggaggaggctctgaaggctgcggtgggaggatgaggcgcctgtggtttaggatctgagaggcggtgagaggggtcatggggaggctctagggacagcgtctgtggggtccgtggggtggatggggtctgagggcagcgggcgcgctctgaaggaggagagggcgctgatggcaggatctgccgactgtgcgggggtccgcgggtgggacgcgtggactaaggactagggaagtgtctgtgtgttgggggtgggggctacaggctggggaagggggctctgaggacagtgtctggggctggggaaggggtcagtggaatggggaaagggttcgctaaaggggcgggcaggggtgtggtctgagggccgcggaagagaaggacagggtgggaggggcctgagggctgggggaagggtctgagggtgatctgagggcccagaaagctctgggaaagttctgggcccacaccccagtcctggtggctttgcactcaccgttgggctagatagtggtcgccacctgactgccacatgatccggccggctgtatgagcgggaatccgaggtgcttgagcaccagtggcctcccgcagcgcctgcgcagtagcatccccttccccaacacagccccagccactcagcctgggccccacagccctgaccagtcggggctgtcactgtctgaggacggggctgtctacccacaccggactaagccctgtaaggcagggccttgggtcgttcttgtcactgttgtgttcacagcgttgttcaccccagaacctagctcaaaagaggcctcattcagtgcttttattctcactctgtcgcccaggctggcgtgcagtggcgcgatctcggctcactgcaacctgcatctcccaggttcaagcaattctccttcttcagccttccgagtagctgggattacaggcgcacgccaccatgcccggctcatttttgtatttttagtagacacggggtttcaccatgttggccaggctggtctcaatctcctgacttctgcccgcctcggcctcccaaagtgctgggattacaggcatgagccactgcacctggcgtttttctcagacaggatctcactctgttgcccgggctggtgtgcagtggcaagatcatagctcactccagcctccacctccagggctcaagccaacctcctgcctcagcctcccaagtagctgggactacaagcacaggccacccaccacacctagctaatttttttttttttttttaagatggagtcctgctctgtcgccaggctggagtgcagtggcacgatcttggctcactgcaacctccatctcccaggttcaagtgattctcctgcctcagcctcccaagtagctgggattacaggcgagtgccaccacgcctggctaatttttgtatttttagtaaagacagggtttcaccatgttgggcaggatggtttcgatctcttgacctcgtgatccgccggcctcagcctcccaaagtgctgggattacaggtgtgagccacagcacctggctagctaatttctttctttcttttttttttttttttttttttgagagataatggggtttcactatgttgcccaggctggtctcaaactcctgacctcaagcaatccacctgccttggtctcccaaagtgctgggattacaggcatgagtcactgcacctagtttcattcaatgcttattaactgagagaatggcttggctctttcttctgtccctccctcgccaagtggcctgggccgagccccttgacttcagtgccttggtgtctgctccccatgtgtgcccttcctttaggcatcccctgggatgaagaaagttctgcatcagtcactggccagacccaacccaggatggtctgcctcagaggtgagggaggcttccttagtcctccgtcaatgccctggctatgctcaatgggtgtctaacgatcttttttttttttttcttttctttttttttttttttgagactgagtctcactctgttgcccaggctggagtgcagtggcgtgatctcagctcactgcaagctctgcctcctggattcatgccattctcttgcctcagcctcccgagtagctgggactacaggcgcctgccaccacgcccggctattttttgtatttttagcagagacggggtttcaccatgttagctaggatggtctcgatctcctgacctcgttatccacacgcctcggcctcccaaactgctgggattacaggcgtgagccaccgtgcccggcctctttttcttttcttttctttttttttttttaaacacagtctcttgctgtcacccagactggagagcagtggtgcagtcataggtcactgcagcctcaaacccctgggctcaagtgatcctcctgcctcagcctcccgagctgggaccacaggcacgcaccaccatgccctactgatttaattttttgtagagaaagaatattgctatgttgcccaggctggtcttgaactcctagactgaagcacgcctcccacctcggcctcccaaagcgctgggagtataggcgagagctaccactcccagcctaacgatctctcttgaactgcaaaacccctagcttgggctggctgaggtcaagatgagcccttccccaaggaggcggcgtcagtgcaggacagcagcttaggcagcacctaaggacttttattgaccacatgaccccctcaggggtgctagtggggtatccttcggcatcctggcagcagccgccgccacagttcttggctgagcagctcctgttccctgcgggcaccctgaagcacgctccggttctcctgggccctccggatcaggtaggggattacctcctccaaggagccatagggaatggacttatacactacatagccggcctgccctgcagggagagtgggttttgttttttcgtttttggtgtttttctgagacagagtctcgctctgttgcccaggctggagtgcagtggtgcaatctcagctcactgcaagctctgcctccaggttcaagcgattctcatgcctcagcctccagaatggctgggattataggcgcttgccacgacgcccggctcatttttgtatttttagtagagatggggtttcaccatg[137 bp omitted]tccccagtccccacctggaacagagacttctgtttctgagaacatggcagattaagtgagttggataaaatttctaactgaaaaagctaaaagtcctggagcaaacttttttttttctctcttagacagggtctagccctgtggcccaggctggagtgcagtggtgtgatcacgactcactgctgctttgacctcccaggctcaaacaatcctcccacctcagcctcctgaatagctgggaccacaggcatgcacctccacgcccagctaactgtttttattttatctcaattgattaattaattaattaattaattttgagacagagtcttggtctgtcgccctggctggagggcagtggcacaatctcagcacactgaccaacctggccaacatggtgaaaccccgtctctactaaaaatacaaaaattggctgggcatggtggtgcgtgcctataatcccggctactggggaggcggaggcaggagaatcacttgaacccaggaggcggaggttgaagtgagctgagatcgtgccactgcactcaagtctgggcgacagagccagactctgtctcaaaaacaaaataaataagctgggcgtggtggctcacgcctgtaatcccagcaactctgggaggccaaggcaggcagatcacctgaggtcaggagtttgagaccagcctggcaaacatggtaagaccccatctctactaaaaatacaaaaattagctgggcgtggtggcagccgtctgtaatcccagctacttgggaggctgaggcaggagaatcgcttgaacctgggaggcaaaggttgcagtgagccaagatggcaccactggactcctgcctgggtaacagagcaagactctgtctcaaaataaataaataaataaaataaaataaaagagaaaatgagaacccagagagagaagagacacacagcaagccacttctgccccaaaagcaaaaccgaggtgctatctgatgaattcacagagttgcggggggacattgagtcagtcttcaagcctgaggtgagagttataagggagaacttccccaagttaagctggaacccaaaaatctacacccttagagtaagagttaataaaaagtcaaccctgcaaccttcccccagtcccaggaaatggtcttggccataaacagatcaaggaagaaaacagaaaaatccacctctgcgaagttggggctatgggttaacccccttatgtatttgcagctcaaatttgtgccagtggggtgtttcaagaaacctcaagctatgaatttaggataaagtgatttcgttctgcttagcacctggcagaaggaaacattaattacctggtgtcaggccctgaggagcagcacagtaaagataacaaaacacacaagaaataatacaccatgatcaagaaccagcagaaatgacagacggcagacacagagacacagccttggaaggcccacagacactggaatgacagatctctctggaaggatctggaggctgggccttggttgggaataggagaagggctctggctgggagggagtaaggcctggggcttgatgggggtgggggagccattcacatacccagtgctagagagacgtggtcacacatgcccagaagttgtccgaaacagacagtcccatccagaggaatgcccagctcccacatgctacagaaaaggccacatcatcagtccagactgtggctgcatctacagcttaaagtcagccactatgcacccatatggcggctccagtaattcaaacattgaagtatttccaaactcaatgatacataataaccagtcctttgcattccttgaaggtcccccagtgactcccagccagttccctggagccctcagacctcctcatgccccagcaaataaggggcaacgtcttgtccatctgggacctataaggacttacaggtatagcaggggttaatgtgtttgtttgtttgtttgttttaagaggtagggacttgctttgttacccaggctggagtgcagtggctcaagcactgctcactgcagtctcaacctcttgggctcaagtgatccttccacctccggaatagctgggactacaggtgtgcgccaccacacccagctgtttttttttttttaatttgttgtagaaatggggtcttgctgtgttgcccaggctggtctcaaacaatcctccaccttcgcctcccaaagtgttgggattataggcatgtgccaaccatgcctggctataaatatttttaaaattctccccagaacacctctgtccatctctggcatttgagcaaaggagaggaagggagggcccttttgtgggcacctatttcccgcccatccctccacctcataccgcttggttgcctggcgaacagattcctcattgtgggaagccaccatgaggtggcacatggggccatggcgggccacgtgcgtcagcatcagttccaggcagcggctgtaactgaagggagatgctctgttcagctcacctggtgagcgagggtcaggccccagcgactggggtgggtggggtgctcctaagcaaggggtctctggaaccagtactctgttccatctgcaccagttgtaagggacatcacttctctgagccactttcatcttctggggttttttgggggttttgtttgtttgtttttgagatggagtcactctgttgcccaggctggaatgcagtggcatgatctcagctcactgcaacctccacctcccaggttcaagggattctcctgcctcagcctcccgagcagctgggattacaggcgtgcaccatcacacccggctaatttttgtatttttagtagagacggagtttcgccatgttgcccaggctggactcgaactcctgacctcaggtgatctgcccgcctcagcctcccagagtgctgggattacaggcgtgagccaccgcacccggccccatgttaatctcttgtcactgtgagtttccgagcaacactgttgtgaggatggagtgagataagggggatatgaagtctttgggacagtggcggcggtctcacaggagagggtcgcatcacatgcacaagatgacatttccccaaggttatcactgctgcattgtcaacagaacatcactagcaacagcccaaatgtccataaatggggaactggctaaggaaattgtggtacagagaagatagtgctctatcgcgcaactgtgaaaaggaaggaagacactgtctgggtactgatatggaagaggaaatagattggcaaacaccttgcaagcatgctgcaggccacgggccacgctatgtatttcacatcctctgtgggtcttccctatcgccccccagacctgttttctacccttctctgcccctcaggaagctgacacttttgccccacatcccccatggagtcatgtgcaggaaggagtgtgggtgtctcacctcggcccctccctgctcaccctgactgtgttctgtgtgtggccacagctccctaaggtggcccctctccttcaactacagcataggggtcaaaatagcttcctaatagcttccctgactttgcccacacttccttttcgttttgtgttttttagagactgggtctcactctgttgcccaggttggagtgcagtggcgtgatctcggctcacggaatcctccaactcctgggctcaagcgatcctcccaccttgggctcccaaagtgctgggattacaggtgtgaggccctgcacctggcccctgacacttctataaacagcctcttcaccacatttcctttagttaaaaccctttgtgcagaattctgtttgctttggagaaagctaatcactcatctaattcccacatcaactctgggaggcagatgttcttattccattttaacagagtggggagactgaagctgagaggggttctatctcttgtccccaggtcacacagctagaggtggccaggctgggatttgaactcaggctgtctgatgctccagagcccaggctccttatcggtaggctagtctgcctttaaaatgcacagttgtggctggacatgctggcttacgcctataatcccagcacttggggaggccaaggcaggagggctgcttcagcctaggagttcaagactagcctgggcaacatagggagaccccgtgtctacaaaaataaaaaaatgtgttgggtatggtggtgtgcgctggtggtcttagctactggggagactgaggtgggaggatggcttgggcctggggagtcaaggctgcagtgagccaagatcgcaccactgcactccagcctgggcgacagagtgagaccctgtctcaaaaataacttaaaaaacaaatgaaaaaagccaaatatacaagggcacatattgtatgattccatttataagattgtctagaataggcaaatccacagagacaaaaagtaggttagtggtttccaggggctgaggggaggagggaacagaaggcagctgactgctcattggtatgaggttactttttggggtgatgaaaatattgtggaatcaaagagtggtgatggttgcacaattttgggaatatactaaactccactgaattgtacatgttaaaattgtgaattctatgatacgtgaattatatttcaatatttaaaataatagtgcaaattattattattattttgagatggagtctcactctgtcgcccaggctggagtgtagtggctcaatcttggctcactacaacctttgcctcctgggttcaagtgattctccttcctcagcctcccaagtagctgggattaccagtgcaagccaccacacccggctaatttttgtatttttagtagagacagggtttcaccatgtttgtcaggctggtctcaaactcctgacctcaggtgatctgcctgcctcagcctcccaaagtgccgggattacaagcgtgagccaccatgcccggccataattttttgtgtttaatgttttttacagatggggtcttgctatgttgtgcagattgggctcaaacccctgggctcaagcaatcttcctgcctcagcctcccaagtagttgggatgacaggtgcacaccactgtgcctggcttggtgccagttaagctgatggtacacaaacgtgccctggagcccctgcagatcttggacatgagcctggattccaagcgtggctaggccacctgctctgtagcctggctgagtccctgtggcccccagagaaggtaccaagaagtaaagatctaaggaggtgagggatggggccatgccactgtctgcagtgggaatgtcccaggcagtggaaacaggatgtgccaagcccctgggtaacatggaggaggccagtgtggctgtagtggagtgagggagaggaagagagggagggaaagttagggaagtgacagggagcatgtggggcttagaggccactgtaaggatttctttttgttttgttttgtttgtttgtttgtttgtttgtttgttttgagacagattctcgctctgctgcccaggctgaagtgcagtggtgcagtcatggctcactgcagccttgaactcctggcctcaagtgatcctcccacctcagcctcctaagtggctggaaccacaggcatgtgctaccacacctgactatttttaaaattttttagagatggggtctccctgtgttgcccaggctggtctccaactcctgctctcaagtgaatctctagcctcagcctcccaaagcactgggattacaggtatgagccactgcacccaaccactaggtgttattatttcctgcagaggccagctggcccgggcctacctctgactggtggcctcatagtcaggctgagtggggtcttccatcccatggagctgggccaccgctctctccttgtccagatatgcacctcgtaccagcttcactccgaaggccaggccggccctgtgcgcagcctctgcatccctccccagccgctcgaatgtgtcctatagggcacgcaggcaggttctggtaggtcagggtgtggggaccccagcctgtacctcctggaacacactgcacacctttagacaggcctggtaggtgttccacacccagggcccgccttcacccgggctgttccagcgcacagccagggcagccaccagcagcgagagcgcagggttcagtgaggtgtactccgcatccaccaggagccgcacgtgctgggcccgggcatactgatggcgacagagacgacggtcagggccccgggtgtccagcaggggcagtggagccagatcccagcaggaggggttacctgtgccacccgatgcaggcggctgagggaggcccggaggtgctggttccagcaggaggggttacctgtgccacccaatgcaggcggcagagggaggcccggaggtgctggttccagcaggaggggttacctgtgccacccgatgcaggcggctgagggaggcccggaggtgctggttctgctcagcattgaggcaggagacctggaggttctagggggcagcaggggaagtggggaaaagcttataagttgctagaaatctaaaaatgagcaatatcagttaggtactatttattgagggggttatgagcctagaatcagggctcgaatccaggcttcaccacctactgtgtgaccttgggcaagttatgtaacctttctgggcctcagtttttgtttgtttgttttttgaaacagagtcttgctctgttgcccaggctggagtgcagtggcatgatctcagctcactgcaacctctgcctcctgggttcaagtgattctcctgcttcagcctcccgagtagctgggattacaggcgcccgccaccatgcccggctaatatttgtacttttagtagagacagggtttaaccatgttggccaggctggtctcgaactcctgacctcaagtgatctgcccacatcggcctcccaaagtgctgggattacaggtgtgagccaccgtgctcagccctccctgctactctttgaacacgagggcaccttcccacctccagccctttacctgctcccatgtttccttcaagtatttgctctaatgtcactttctcaacatggttttcccacctatacattggcaacttcttttcctcttcctcagccttattttcccttacttgttacgtactgacttttgttttgctgagacggggtcttgctgtgttgcccaggctggaatgcagtggcacgatcatggctcactgcagcctccacctccccagctcaagcaatcctcctgcttcagccttccaagtacctagtaccacaggcacccaccaccatgccgggctaattctttactatttgtagagtcaaggtcttcctatgttgcccaggctggtctcagtctcctggactcaagcgatcctcccacctcagccttccaaagtgctgggattctgactttggttttaattattgtctcttgcccctgacttgcaagtaagtgcctcgaggtcagggattttgccttcatgcttcctcggcccctagcaccgtgtctggaacaagatagatgttcagcaaacacttcgggagtggatatgcttgtaacatggaaataagaaccgtttctaactcacagtcttatgcagattcatctggctgaatgtgagctgctggtgactccagggagtctggctgggttcaaagaagttgggaaatggaagaaagaggaacaggtggggctgaaagctttattatatccaacagggtcgatacagatgacataggcctgggcttgctcatggaatcccacctggaggcaggttgggctggaagctgcaaccttccgcatggtggggagaatgctgcctcctggagaagggaagacctggaggcagcagcctggtttcctcctcccctgtcagaggattgtctcctgcttgacttggggcgtagtcttaggccctcagggagctatttcagacacccaccaaatatttaactcatttaatatttaccactctctaatgtaccaactgttattatccccccattttctagatggggaaactgaggcacagagcagggaagtcacttgtcaaaagtcacacagctaactcagggcagacctgaggtttaaacctcagcctttccagagcctgggtctttctctcttttctccctccctccctccttccctcccttccttccttccttcttttttttttttttttgagatagatctcactctgtctcccaggcaagagtgcagtggtgcaagttcaagtgattcccctgcctcagcctcctgattaactggggctacaggcacgtgccaccacttctggataagttttatatttttagtagagatggggtttcaccatgttgcccaggctggtctcaaactcctgacctcaagtgatccagccccacttagcctcccaaagtgctgggattacaggtgtgagctacagcacctggcccttttttctttctttctttatttctttcttccttccttccttccttcctttccttccttccttccttcctccctccctctctttctttcttcgctctcaaacttgccagctcaagcaatcctcccaccttagcctcccaagtagccaggattacaggtgcctgccaccacacccagctaatttaaaggaattttttgtagagatgagggtttactatattactcaggttggtattgacctcctgggctcaagcgaccctcctgccttagcctccacaccaggtgtgcaccagcacacaggctgattttttaatttttttgtagagatgagatctcactatgttgcccaggcaggtctcaaactcctgggctcaagtgagcctccaatttcagcctcccaaaatgcagattacaggcatgaggcactgcacccagcctgttttaatccttaaaaccactgagaagttgctgtcactctccctacaggaataaactaaagctcatgaagaggtgaactccttactctccaaagctgattttctgaaccatgaaatcttgtttctatgtgttctctgacacactttaaaaattacaaataaggccaggtacagtggctcatgcctgtaatcccagcactttgggaggccgaggcacgtggatcacgaggtcaggagttaaagactagcctggccaacatagtgaaaccccatctctactaaaaatacaaaacttagctgggtgtggtggtgtgcgcctgtagccccagctactcaggaggctggggcaggagaatcgtttgaacccgggaggcggaggttgcagtgagccgagatcgcaccactgcactccagcctgggcaacagagc[141 bp omitted]gtgaagcctcatccctactaaaaatacaaaaattagccaggtgtaatggcaggcgcttgtaatcccagctactcgggaggctgaagcaggagaacccgggaggcggaggtcgcagtgagcagagattgcgccactgcactccagcctgggcaacagagcaagactctgtcttaaaataataataataataataataataataataaataaatagataaacaaataaaaattacaaataaaaaaaggttagaaaaagaaacatcagcatgtccactatagcattgtttgggagggtggagacacagaggccacccaggggttcaccccaggagaggtaaaccatgcagcagctagaatcaactattggaaacagtgggggccgggcatggtggctcagcccataatcccaacaatttgggagggtgaggcaagaagaatttttttttttttttttgagacggagtcttactctgtcaccaggctggagtgcagtggcacgatctcggtttactgcaacctccgcctcccggttcaagcgattctcctgcctcagcctcccaagtaactgggactacaggtgtgtgccaccacgtccagataatttttgtatttctagtagagacggagttttac[140 bp omitted]tgtgtattggttaaggttcatcaaagggcacatttacaatgtgtgtagttcattgttttaccttgaaagaaaaaaagtactgcgaataattattgggctctaattaatgagcccattattcatatcctgaagcatttagggggaaaacatgtctgcaatttactttgaaatgcaccaaaaaataagatggattgatggatggatagaggaatagagggatagatatgatttaaagtgagtatagttaaaggtggcgggggcatggatgttcatgtacaattctttttacttttctgtatatttgaaaatttttataatagaatattggggaaaatatgccccccacgaatggtatacacctggcaaaacaaaatcatagaaacaaaaagatatgcattatacaagacggcaggctgggtgtggtggctcacacctataatcccagaactttggggggctgaggctgggggattgcttgaggccatgagttagagaccaccctgtgcaatacagtaagacaaagagaaagagagagagagagagagaggagggaggagagagaaggaaggaaggaaggaataaaggaaggaaggaaggaagggagggagggagggaggggagagaaggaaaaagaaaagaaggaaggaaggagagagagcaaaagaggaagaggaaggaaggagagagagagaaagaaagaaaaaaagatggagtagggttgaaagagaatgtggagataaaaaggaattaatgattgaatgaacaaactaagaccccattggcctaatcagaacttacacccagccagctcacacccatgcagctgtgttgactgagaacacactgatgtacctccttctaattgataaacagcttctatcccaatccctcctctgagagcctccagcctccaggctcctccctgagaacccagatgaccctgattccatccatttcaaccatgcctgggagctacagctgcacttctgctggctgttccaagcctggaggtggccgtagcattttgaacatctggcgtgcggtgtggccgcatctaagtccaaggcactctgtccccgacagtcccgcttgagatccttacctgcccagagtccatagcttcagccagcctctcggggctcagctccaaggaggctcctggccttctgacccacgaggctagctccttctgaaatggggtggtaggcggggtggtgaggggagcccgatgggcagccgcgccctccccgcacccccgtctttgcactccttacacagagccgagtactggtcagcgccgtcaccttcagctgcatgaggctggcctcagccaggctggggggctccaggaggccccgtgacaggtccacacaccgcagcatagcaccgaggttcccctcataccacgcctcactgcccagccagcaggtgtcagggcccgaacagcaaagccccttcctgcgtcctcccagcctccctgggccctggctccctactcacccactcttggcagcagagtccggctcctcctcagtgggcactgccagcagtggtcggaggctgagggtccgcagctgctgcacgcagcccttcacctcctctgctgtctcaccagccacaaactgcccatagacggatgctcggagaaatgcgcctgagagccgggagcccaggagtcgccgagaccaggcctggagctgggtgacagggagcgagggctcagcgccaggctatgaggagcctccaggctggtcctcaggatcactgctcaccaacagcccgtgagtgacgagtgggggccaggcacacagccggagaaccagcaaggcccgtgtcagctctcctgtgcccttaaggtggaaggccccgccatcaaagctcagggactgccagcccctggaggggggaccagcttgggaacagagcacgtaacaggtccggagcatcctgggtccctggctgcctccacaccagggaaggttctctggaggcagcaagttcaccaactgccccttgcccagaccaggggcagtgactgattaactgggcaaagcctcaggatcacaggctccttgggggcaattaattattaacaaatggggacagagttcagagtaacggaaacgggaggtgaaccccagtaacagcccccaagaatgctcagcacaacagcctgcacttattaggtaaccaccatgtgctggggaaagcaggggctccggagcaaggatccctgggctcaggacaccgggctttgtgatccaggacaggctacttaatcacttttgtggcaattgcttcctcttaaaattggaaacgctgtagtgttattgaatacatttgaaaatacggttctcacgtttgtaatcccaacactttgggaggccaagaccgaggagtttgagactaccctgggcgacatagtgagaccccatctctacaaaaaatacaaaaattaactgtgtgtggtggcacacacctgtggtcctagctactcaggaggccgaggaaggtggatctcttgagcctgggaggtcaagggtgcagtgagctgtgattgtgccactgcactccaccctgggtgacaaagtgagactctgtcgccaaaaaaagaaaaaagaaaagacaaataacctatataacccagctgttccatgctaagtacatatcctagagaccttaaacatggacagcaggaaacatgtacaggaaagaatgttcagaggagcagtgtctgaactacccaaatgtccatcaaaaggagaatggatacatatatggtggtgtagttatgcaatggaatactatacagtaatgaaaaagaatggatactgatacacacaactgtgtggctgaatctcacaatgtcaagtgaaagaagccagacaccaaacagggcaagctgtattattcttttttttttttttttttttttttttttgagacacagtttcactcttgttgcccaggctagagtgcaatggcacaatctcagctcactgcaaccttcaccccccgggttcaagcgattctcttgcctcagcttccagagtagctgggattacaggcatgtgccaccacgccccactaattttgtatttttagtagagacagggtttctccatgttggtcagactggtcttgaactcccgacctcaggtgatctgcccgcctcagccttccaaagtgctgggattacaggcatgagccactgtggctggtctatacttttcaataaatataaaagcaaggaaagtgaaactgcagtaaaatgttgggaatacatgcgtgggtggtcaaactatgaggacaagaaaagtaaggacatgattatcacagaagtcagagaggtggttgattgtgggggatgggaggaattgtaatggggtagagggatatggggacttctatatcctattttctttttttaaaatggaaaccatatgtcttaatttttttgttttgttttgttagacgtatccttgctctgtcacccaggctggagtgcagtggtgcgatctcggctcactgcaacccccatctcccgggttcaagtgattcttctgctttagccccctgagtagctgggactacaggcacccaccaccacacctggctaatttttgtatttttgtagatatggggtttcaccatgttggccaggctggtcttgagctcctgacctcaagtgatccaccctacttgtcctcccaacatgctgggattacaggcgtgaagtcctaggtctttttttttttttttttttttttttgagacagagtcttactctgttgcccaggctggagtgcagtggcacgatctcggctcactacagcctctgcccccgggttcaagcaattatcctgcctcagcctcccgagtagctaggattacaggcgtctgccaccgcgcctggctaacttttgtgtttttagtagagtcacggtttcaccatcttggccaggctggtcttgaactcctgacctcatgatccacctgccttggcctcccaaagtgctgggattacaggtgtgagccactgtgcctggcagtggcttctaggtcctaggagtcctaggtcttaacatggatgatgattcatagttgttcacattgtaaggttttttttgttttgtttttgagacagagtcttgctctgtcttccaggctggagtgcagtggggtgatcactgctcactgcagcctcaaacttctgggctcaagcaatccccccacccaccacctccacctcccaagtagctgggattacaggtgcatgtgatcacaccgagggtaatttttaattgtttttttggtagagacagagtcttactatgctgcctaggctggtcttgaacccctggactcaagcagtcctctcaccttgggcctcccaaagtgttgggatttcaggcatgagccacggcacctggccctcacattgtaagttttttttttttgagacggagtcttgctctgtcccccaggctggagtgcagtggcgcaatcttggctcactgcaagctccgcctcctgagttcatgccattctcctgcctcagcctcccgagtagctgggactacaggcacccaccaccacgcccggctaattttttgtatttttagtagagacggggttttaccatgttagccaggatggtctcaatctcctgacctcgtgatccacccgcctcggcttcccaaactgctgggattacaggcgtgagccacactgcgcccggccttgaaatttttatttattttcttatttatgtatgtatgtatgtatgtatgtgtgtatttatttatttattcatttttgagacagggtctcactctgttgcccaggctggagtgcagtggcacaatttcggctcactgcagcctcaacctcccaggctcaggtgatcctcccacctctgcctcccaagtagctgggactataggcacatgccactatgcccagctaaatttaaaaaaatttttttttcctttcttttttgtgatgggggatctcactctgtcacccaggctggaatgctccagcatgatcatggctcactacagcctcaaactcctaggctcaaacaatcctcctaccttggcctcccaaacgctaagcttataggcatgagcctctgtacttggcctgccttttttttcttttctttttttttttggctccatcttgctctgttgcctaggctgcagatgtctgctcactgcaacctccgcctcccaggttcaagtgattctcctgcctcagcctcccaagtagctgggattacaggtgtctgctaccatgcccggctaatttttgtacttttaggagaggcggggtttcaccatattaaccaggctggtcttgaactcctggcctcagatgatccgcctaccttggcctcccaacgtgctgggattacagacgtgagccaccacgcccagcctagggcctcatccccagaaatgtgattactgggtaggcattggggtgttgaaagctcccctggtggttcaaatgttcacccaggtgaagaggcacggcccctacaatcggacaccttagcctctctaaatggggtcctccctccctctttgtcttttcactgtccctggaacacacccagcttcctgctgttgcatttccgctgttccttttccctgaaaactccacccttccttctttccctaattaactcccacctgccctcaggtgtcagggtttaagacaccccctcaaggaggtctgccttgagcagcccctcccagatgagggggagttttaccctttcacattttaacaccagccttgtagctcttgtcatgtttattcgtctgtgagtgaagactcagtttctctccccacgcccctgctagactgtgaacaccatgaggtcggggggtcacatttggttttgtcattaatttatccctactgcttaacacaggacttatttttgttgaatggacttatttttgttgaatgggtaactaatttaatagatttctttggtatttgctggacaagggacttatagattgcatcacatcaattcaagcagattctggataagacccacctttttttttttttttttttttgagacagggtctcactctgtcgcccaggctggagtgcacaatgtcggctcactgaaacctccacctcccgcattcaagcatgctcctgcctcaggctcccgagtagctgtgattacagttgcaggccatgaggcacacgccaccatgcccggctaatttgtgtgtgtgtgtgtgttttttttttttttaagtagagacaggtatttcacattgttggccaggttggtctcaaactcctgaccttgtgatccgcccgcctcggcctcccaaagttctgggattacaggtgtgagccaccgcgcccggcctcgaagtttttttgtttttttttttttaatgagacatagtcttgctctgtcaccagctggaatgcacggcgcgatctcggctcactgcaacctctgcctcctgggttcaagcgattctccacctctgcctcccaagtagctgggactacaggcgcacaccgccacgcccagctaattttttgtattcttttagtagagatggggtttcaccatgttggccaggctggtctcgaactcctgagctcaggcaatccgcctgcctcgacctcccaaacatggccttgggaatcgccatgtttgggtggacccagttgggtggcctgcatttgcatattaaa[134 bp omitted]gtgaaactccgcctctactaaaaatacaaaaattagccgggcgtgatggcgcgtgcctgtaatcccaactactcaggaggctgaggcaggataatcgcttgaaccggggaggtggaagttacagtgagccgagatggcgctattgcactccagcctgggcaacagagtgagactccgtctcaagaaaaaaaaaaaaaaaaaaaggtagaaattagagagtatagaagagaggcaatcttggaagaaataatggctgagaattttccagaactgatgaaaaatacatattcacaaagaagcaaagatatcttaagctagataaaacaaaagaggccgggtgtggtggctcgtacctgtaatcccaacactttgggaggctgaggcgggcagatcacgaggtcaggagttcgagaccagcccggccaaatggtgaaaacctgcctctactaaaaatacaaaaattagttgggcgtggtggcacgtgctggtaatcccagctactcgggaggctgaggcagaagaatccctcgaacctgggaggcagaggttgcagtgagctgagatcgcccattgcactccagccttggtgacagagtgagactccatctcaaaacaaacaaacaagcaaacaaacaaacaaacactaaagaaatccatgcctaaacacatcatactgaaatggcagagcattgaagctaccgaggtctattatttatctttgcatcctccagagtgtagcctggactagatgctccaccaattcaattacatcaagagggtgggtatcccaggttgagaccacagacaaattaaaggcaaggaggtagaaacaaatatggctataagaaggaaaagcatttttctcacctatctgaggcacacaacctggattgggggaaagtgaagttgaaaatgagagtgtgggagagggagagactaggtggagagaatttttgtttcgttttgttttagagacagggtcctgttctgtcacccaggctgtagtacagtggtgtgatcgatcatagctctcatagctcactgcagctttgaactactgggctcaagggatcctcctgcctcagtctcccgagttgctgggactacaggagtgtggcaccacagctgggtaatttttgtgttttttgtagagatggggtctctctgtgctgcctgggctggtctggaactcctggtctcaggtggtcctcctgtctcagcctcccaaagtgcttggattacagacatgagccacccacacctggtcactggggaatcctgagtgccctgcaaaacagaacacaatgggctgctcaacagtagccatggaaggttctggaataaagttcccagccggtccttctgtgggtgattgtccattttgtggtaagaggcaaaggggctctaacaccagcagagaggcagagccataggtgggagagtccctcttattctctctggttgggtcaccaggtgaccccataccaatcactgggattgaagaataaggtattccagccagctccagtgctgtgcctgtttctggagcttcaagagtgctcaaccaatgcacaaaacctacctggggcgtggtggctcatgcctgcagtaccagcactttgggaggccgtggcgggtggatcacctgaggtcaggagtttgagaccagcctggccaacatggcgaaacctcttctctactaaaaatacaaaaactagctgggggtggtggcaggcgcctgtaatcccagctaccgggaggctgaggcataagaatcgcttgaacccgggaggtggaggttgcagtgagccaagatcgcataactgcactccagcagcaacacaggtgcactctctctctaaataaacaaataattaaaaacaaaatgaaacaaaaaactggactcatgcgtgactctgatggttccaggaggtgatacatatacagaacatagaatgtgagctggcatgtgttaggagctcataaatgctgtctgtcactgctgctgcagcgactcattggcttcctgtcacccacaggataaagcacaaacccataagatgagctttgtggtttatctttggccatctcactagccttaattcctaccactccctgacttgggggttattctccagcaacaattttagggaaatcccttcccacactgtgctcctggagtcttctttgtctccagcccctgcacagctacttatcccttaatactggagtttggtgacagcttaggagcagaggacagtccagccagttttaatctccagcacagacctctctcctgagctctggaacccaatgtacacacacacacacacacacacacacacacacacacacacacacacacacacatgctcattcagaatcccctcatggattggttcttctcaaacgggacacgaccgcaccctggtgggagcttgggaaatttgcataattgtttttggctgcagcattgattggagggcattacaggcatctagaggcaggaccaggaatgctggacgctgaaatctgcatccagaacagtttgtaaatgtctttgcaggcgcttctgtgcgtaaaataagtttacagttatctgaaattattaatataacacatataccatacacacaaaattttggtatggtttaaaatatattgacattttctgaaatgaaactatgatgtaaatttatttttatttatctattttttttggagacagaatctcgctctgttgctcaggctggagtgcagtggtgccatctcaactcactagaacctctgcctcccgggttccagtgattcttctgcctcagcctcccaagtagctgggtttacaggcctgtgccaccacgcccagctaattttttgtatttttaatagagagggagtttcaccatgttggccaggctggtctcaaattcctgacctcaagtgatcctcctgccttggcctcccaaagtactgggattacaggcgtgagccactgtgcccggcttctgatgtaaagaaagtgaaaattgtgtacttttttgttcagaatggcaccaatggttatacatcatatcagaagaatcacaattccaacaatgccacctatgagatgtaatgtaaaattctgaatgaagtatagcacacataaagaaatgtgcccatatcatgtgttcagtatgaattttcaggaagtgaccagaaagtaaatttgacgcaagtgacacttgaataactaacacccaagtcaagaaaacaacttcgtaatcccagcacttcgggaggccaaggcaggaggatcgcttgggcccaacctggacaacatagtgaaactctgtctctacaaagataaaaaattagccatgtgtggtggtgcacacttgtagtcccagctacacaggaggctgaggtgggaggatcgcttgagcccaagagttggaggctgcagtgagccatcatcacaccactgcactccagcctgggagacagagcaagacaccatatcaaaaaaaaaaaaaaaaaaaaaaagaaagaaagaaaagaaaacaacattatgaggattctcaccccaagccttcctggtgccagtttcaatcaccatccccctctctcccaaaggtaaccagactctttgtttgtttgttgagacagggtctggctctgttgcccaagctggagtgcagtggtgtgatgatggctcactgcagccttgaattcctgggctcaagcaatcctcccacctcagcctcctgagtacttgaggctaccgttgcacaccaccatgtccagctaatttttgtattattttgtagaaacagggtttcaccattttacccaggctggtctcaaactcctggtctcaagcaatctacacatcttggcctcccaaagtgctgggattacaggcatgagccccggctcaggttatgcacttttatagtcagtagtattagtaacatgtggttgtatccttctcagtaatttttttttttttttgagacagagtctcgctccgtcgcccaggctggagtgcagtggcacggtgtcggctcactgcagcctccgcctcctgggttcaagcctcctgagtagctgggattacaggcacgtgccaccactctcagctaatttttatatttttagtagacacagggtttcacatgttggtcaggctggtcttgaactcctgacctgaggtgatctgctcacctctgcctcccaaggtgctgggattacaggtatgagccaccacgcctggccccttctcagtattttatatcagggggctccttgtgtcagtttgtcccatgactggtagcatcaactttgatcatctggtgaaggtgacatctgtcaggtttatccactgtgaaattactatttttccccaagtaactaatgcaatacatgctttttaggctctactaatttgagtttccaccccttgcaaattatttatttcctcctcagttaactaaagacctcattcaaactggtttaagagtgaaggacatttaggccgggcgcggtggctcacgcctggtaatcccagcactttgggaggccaaggagggcggatcacaaggtcaggagatcgagaccatcctggccaacacggtgaaaccccgtctctactaaaaatacaaaaaattagccgggcgaggtgacaggtgcctgtagtcccagctacgtgggaggctgaggcaggagaatggcatgaaccctggggcgcggagcctgcagtgagccgagatcgcgccactgcactccagcctgagtgacagcgagactccgtctcaaaaaaaaaaaaaaaaaaaaaagagtgaaggacatttatggttgcaactaactgaaaatgacattcagactgacctaagtggggagggaaactggtagtctagaagtagccctgacttcaggtgtggctggatccagtggcttggtacaactaggcatttgtcttgttcatcaatatctgtatagattaagggggactagatccggggaaggcagaagcaatagatgtccgctacactgaatcagaaaaaggagaggaggaagtaggaactgcatgaagagacccagccacagcctgcggttactttggagagcttcttccaagtggttcatggtgctgagcaacccaggacctggcttagcagcatattccttggccacagtggttggttccaggacaggcataagacccagcctgggctgatgaaagacagccccagagctttccagaactattggcataaagaggcactctggctgctgagctcatgggataccagcctagaactacaagtggtcttctctgtttcccaaataaagggtctacccgagaatgaagctagaccttgcatggctatgtttcaatactaggtctggcagtgtctgaagccaacgctaccccctgcaattgtcagctgcaagagccaacaaatttcct[131 bp omitted]ggccaacatggcaaaaccccatctctactaaaaatacaaaaattaattgggcgtggtggcgcacacctgtaatcccagctatgcgggaggctgaggcaagagaatctcttgaaccaggaggcagaggatgcagtgagccgaaataacgccactgcactccaacctggactacagagtgagactctgtctcaaaaaaataaaataaaaaagaataaaaatacaaaaattatctgggtgtggtggcatacacctgtagtcccatctacttgggaggctgaggttcaaaaattgcttgaacccaggaggcaggggttgcagtgagccaagatcgtgccactgaactccagcctaggtgacagagataaactgtgtctcaaaaaaaaaaaaaaaaaaaaaaaggctgggcacagtggctcacacctgtaatcccagcactttgggaggccgaggcgggcggatcacaaggtcaggagttcgagaccagcctgaccaacatggtgaaaccccgtctctactaaaaatacaaaaagttagctaggcgtggtggtgggcgcctgtagtcccagctactcgggaggctggggcaggagaatcacttgaaacaaggaggcagaggatgcaataagccgagatcgtgccactgtattcgcagcctgggtgacaaagtgagactctgtctcaaaaaaataaaaataggccaggcgcagtggctcatgcctgtaatcccagcactttgggaggccgaggcgggcggaccacttgaggtcaggagttcgaaaccagcctggccaacatggtgaaaccccgtctctactaaaatatacaaaaattagccaggcgtgatggcaggcgacttaatcccagctacttgggaggcagaggcaagagaaccgtttcaacctgggaggcagacgttgcagtgagcagagttcgagccattgcactcaaacctgggggataagagcaagacttctctcaaaataataataataataataataataataataataataaaaaataaaaacaaaaataaaaaataaaaattaaaaaagaatgttgtaggttttttctttgaaaaggaaaaatatacaattacatgttgttggctgtggatttatttgaaacaaaaagaaaaaatatacaattagaaaaattctactgttagaaatgaagtcaccttttaattacagggaaatcatttagatcttaatgtgtttatgtattccagtgctgtggtgtaaaaacttattttagtctgtgctgataaaaaataacattgtcatacaacaattggggtgtatttgtaaaaaagaaaacaaaagaaaaataaatatattgacaaacacgtgaactagaaagttttgataatatggttaatcaagtagaagtgtggtctgaagaaagtctgttcttcatggaaacaggtgggcttctcagctatcctgctattcaatagaaagatggagccaggcgtggtggctcacgcacacctgtaatctcagcactttgggaggctgaggcgggtggatcacttgaggccaggagtttgagaccagcctggctaacatggttgaaaccccatctctactaaaaatacaaaaaattagccgagcctggtggcggccgcctgcaatcccagctactagggaggctgaggcaagagaattacttgaacctgggaggtggaggttgcagtgagctgagatcgtgccattgcactcctgggtgacaaagcgagacaagaaaggaagggaagagaagggaacgggaggggaggggaggggaggtaaggggaggggagggaaggggaggggaggggagggaaggggaggggaggggagaggagggaaggggaggggaggggagagaagggaagggcagcggaggggagagaagggaagggaagggcaggggaggggaggggagggaaggggaaagagagagagagagacagagacagagagagagagaaagacaggaaagaaaagaaggaaggaagggagggagggagggagggatcctcttactgggctgttattatgaagcctgtttttaaaatcacttttattgagatatcatttatgtacaataaaaatgcacccatcttaagtgtaaagttcaatgagttttgacaaatctgtgcacccgtgcaaccaccaccacaatcgttatatagaatatttccaacacctcagaaagttctcccatgcctttttgcagtcaaccctcctctcatggccccaggaaacctctgctgtgctctctgccaccgtagattagttttgcctattttagaatttctataaacgaaagcacacacacagtacatattcttttcctctagcttcttttgattgtctgtttattttaatgcttatggagcatacttatgtttacatgtgtcatagtttatgcctcctgtgttagataactgtcggaaataataaaataataggtaggatgcaacatggattcataaattccacttattattagctatttcagacgtcatggaatgcaaaatgaacagagtttttcatatgtctttccccacttctgaaaactttacttcatgaagcacttagggaccctcagaatagcattttattttttatttttattttatttttattttttgagacagaatctcgctctgtcgcccaggctggagtgcagtggcgtgatctcagctcactgcaacctccgcctcctgggttcaagcaattctcatgcatcagcctcccaagtagctgggactacaggcatgcgccactactcctggctaattttttatatttttagtagaaatggagttttaccatgttggccaggctggtctcgaactcctgacctcaggtgatccacccgcctcagcctcccaaagtgctgggattataggcgtgagtcaccgcacccggcagcatttcatttttgagacgacgtttacaatctgccctgtccttttggagaagtttagtttctaaagccaaccccaggatgcaccttgtttctactctggtaccagctgaaccatctctgtcactcagccccctccatgtcctctcctgacaccaagtccctttgggttttatggagctcacctaaccagctcggcccaggctgtaatgagagagaccagtggagtgtaaattcctgcaggtgcaggacaatggggttgagagggctcttacaccagatgtcccctcagctcgaagggcagagaatcgggttccagagtgtccaagtctccggccacctggtcatagattcctcttggatcctgatatgtgtcttcaggccagtggaggtcccagggtccctgacaggcaaaaagtggagttagaaccatggagagatgccctgtaggtcttcattgaagatctgggggatacatgcccctgcttaacttcccagaaaaaagtgttttagcttttactaaaatcccaacatatacaaaaaaggagtgtgattataatgaatgcttatgatgaaccccatgtgcttatcacctaacttcaacaatatcaggctgggcacggtagctcatgcctataattccagcactttgggatgccaaagcaggaggattgcttgagaccaggagttcgagaccagcctgggcaacatagtgagatcctgtatctacaaaaaataattttatttttcttagacagggtctggctctgtcacccaggctggagtgcaatggcacgatcttagctccctgcaacctccaccttctgggctcaatccatcctcccacttcagcctcccaagtagctgggactacaggcatgcatcaccacacccagctaacttttgaattttttttttttttaaagacgagg[131 bp omitted]taaagaaattagctaggtgtggtggtgagcgcctatagtcctagatactcaggaggctgaggtaagaggatcgcttgagccccggaggtcaaggctgcagtaagccatgatcatgccactgcactcccgcctgggtgacagactgagactatctcaaaaaaagaaaaaaagaaaaaagaaaaaaccagtagcaacccttggtcaattgatttctctgtatttctatcttgttcccctccccgactaactggattattttgaagcaagcccaagatacccaatgatttcatgttagaaaaataatgtaaatgtcagaaatataaaacctttaggccaagcatggtgactcatgcctgtaatcctagcattttgggaggccaaggcaggtggatcacttgagatcaggattcgagaccagcctgggcaatgggcaaaaccctgtctctactaaaaatacaaaaattagccgggcatgatggtgcatgcctgtaatcccagctacttgggaggctgaggcaggagaatcgcttgaacctgggaggtggaggttgcagtgagctgagattgtgctactgcactccagcctgggttacagagcaagcctccatctcaaaaataaataaataaataaaatttttaaaaatgaaaactttaaaagtccatgttatcaggtatggcaactgtggaatgtaagttatgattatattgtcctatgaatttccaaaacagttccctaatcataatagaaaaacaaaacaaagcaaaaccaaacaaacaacaacaacaaaaagaacatgaatggtagccctaactggggatgtattttgttctagggctgggagaaaatgattattttagttcagcaaactttagagcagattggcccatgctccaaatatggcctgccacctgcttttttatactgcccaagagctaagaatggtttttatttttttctttttctttttctttttttttgagacggagtcttggtttgttgcccaggctggagtgcagtggcgcaatcttggctcactgcaacctccgcctcccgggtttaagcgattctcctgcctagcctcccgagtaggtgggactacaggcgccagccaccacacccggctaactttttgtatttttagtagagacggggtttcaccatgttggtcaggctggtctcaaacttctgaccttgtgatccgcccgccttggcctcccaaaatgctgggattataggcatgagccaccgtgcccggcctggtttttcattttttaattgttgggaaaaaatgaaaaaagataacatttgtgacatagaaaaattacatgaagttcaaattacagtgtccaaaaattaagttttgtaggaacatagccacactcattcatttatgcatcgtctatggctgcttttactttacggtggcagagtttgtgtagagtttgaggaagaccgtatgtcccacacagcccaaagcatttactactatccggccctgttcggaaaaagcgtgcagcctccatctacgctttagagagtgcatatggtccagcaccatggacagcgctttgcgccatgctggtgaggagctaggatctgacaacagtcccggtatcggaggtcgttcacagagacagaaggaaatccttggcccaggaggtgccagagcatcagccaaggccacacaggaaatcaggggttctgtcccatctccctaactgtgcagcaatgggtggggattggctggtggtcaaagtgcctgtctgttgtttttgcctgtacagccaccatcctcatttccctgtgagctctctgtccctctcctactctcagcccagtgacctgagtggggctggcccctactccctgatcccatggtgaactggcccaggcctctcctgttagcatattccatcccctgactcagggatgtgttcagtgatgaggatgtgacccaagctagaccaattaagtgtcagcattgggcatttggggccactggaaaacaggtatactctttctttgaagatttctaatctcgtaggatacaaatctagattttctgggaatattttttccctttcttttttgaaacagtctctcaggctggaatgcagtggcacaatcagggctcatggcagcctcaacttccctggctcaggcattcctcctacctcagcctcctgagtagctgagaccacaggcatgcaccaccatgcccagttaattttttaaactttttttttttttgagacagagtcttgctctgttgcccaggctggagtgcagtggcatgatctcggctcactgcaacctctgcctcctgggttcaagcgattctcctgcatcagcctcccaagtagccgggattacaagtgtgtgccaccacatccagataatttttgcattttttgtagaaatggggtttcaccatgttggccaggctggtctcgaactcttgacctcaggtaatccacccacctcagcctctcagagtgctgggattactggtgtgagccaccatgctcggcttaacttttttttttttaaagatggggtattattgtgttgcccaggctggtctccaatacctgggctcaagcaatccacctacctcagcctgctgagattagagatatgagccgtgaccatgcctagccataaaaacatttttagggaagaaattctgggcccagctgggcctgatgacaattgtatgccttgatttttcagttgaatgggcccccaaattctctctttctctctctttaaccagtggagtagatatggctaattatctttaaaaattcatgtctacttccttccacagtagcagaattgcagcaaggcacatcactgctaagctagaccacatttcacagcctcctttgccgtcagatgtgaccatgtgactctcttcccaccaggggagtgagagcagagtggtgtgcaccatttctgggcctgggccacaaggcagggttgtgcctcctccacattctttcaccttttcccatgggttgaacccccagtgaactggctcattcatgtagactcggttgacttgagcagggccactcacgtctgactgaaaaagaaatagactgccttctttttttcagagacagggtcttgctctgttgcccaagctggagtgcagtggcaccatcatggctcaccgcagcctccaactcctgagctcaagggatcctcctggctcagcctcctgagtagctgagactacaggtgcacacctccatgcctggctcattttaaaaaatgttttgtagagacaagtcactatattgcccaggctcgtctcaaacttatgggctcaagcgatcctcctgccttggcctcccaaagtgttgggattacaggcatggaccatcatgcccagccgactgtctttaagccactggatcatggtcaggcctctttgttacagcagctagctggccctaactaatacaagcaataggaggtaggctcccagcactagccaggaaggatggttgctgatgcaaagcttctcaccatctgcacttcatcgtagaggggtccccaggctccagacggggggtacgttctttctacctcatcatacaagtgcccagggaaggccatatcctcatcttcacctgtgaaacctggagttggagtggaagggagacacgatcaaggcacccagtccaggcgtcgggggtacctctgagtgagggaatcctgacatggtcctaactcacctcgggaataagacacctcctcctgcgtcgggggcagctgggggctgaagtccctcagggagcggtaatacggctctgcctctgttgtgctgacctgttccccacacgcaaaacaaacaaagccctttccatcctctgaccccactgtgcccggaagggcaatgatcaacctgatgctaacggcagggcttcagtcgccgtcggtgccctgattgtggggtcaccagggccacccccacttaccgtggagctctgagtgtcccgctctcctgtccactggctctcctcatattcgttcctgactcggtcctcttccgaccttccaggatgaaggtgtggggggaagttgagtgctgccccccgccaccagtctcccccaaacctccctcagagccttctttacagaaaaatatccccacttaccctgcctctgtcttctctgagatgcctgaaggaaacaggaataaagggctcagtgaccctatgcaagccccccaccccggccccaggaagaccttcagtatgcagcaaccacagggttccctatcaccctcgggtctccaccctggcagggaagggtctctcctcaccctcagcaagacgcctgagtctccgctgccagaggacccccccgacacaggaggcattggagaggagcagaagccccccaagagcgaacagcacaggcagcaggggcagccccgagggtcctaggggtggaagatacccctcagtgaatcccagacaacaggctgtaggccaggggtgggtctccccgagaaagtgtagccctgaccaagtccctcccccagggtcagagaaacagatgggcagaggtctctgtgcccaccctttctgcccacccaagggcaggtggcttctttcttaagtcaagccattagcaaaacttcctccgtttgcttgaactctgcaaactcagaacggaactctggactcaggagggagcttcagctcgttagctgggcactgaagactttctgtggtccagcctcttcccacgcctccagccatgcccaccaaacttagaccctggtactggactgtccagccacacaaatcaaccaccagctgtttccagaatcactgaagcaaattcacacctcagagctttggaatagttaagtgtctgtcctcaaatgtcctttcttctcaagcaaacttctgtttgcctttcaaattctatctcaaggtcaggcgctgcagcacatgcctgtaatcccagcatgttgggaggtcaaggtgggagaatcgcttgagcctaggagctcaagaccagcctaggcaacatagtgaggctgattctttacaaaaaaaattaaaaatttagcagcatggtggtgcatgtctatagtcccagctactcgggacactgaagcaagaggattgcttgaacctggtaagtcaaggctccagtgagctatgatagcaccactgcactccagcctgggcagcagagcaagaccctgcctctgaaaaaaaaatcccatctcaaggacttctttattttattttgttttttaattaagacggagttggctgggcacggtggctcacgcctataatcccagcactctgggaggctgaggggttggatcacaaggtcaggagttcaaaaccagcctggccgatatggtaaaaccctgtctctactaaaatacaaaaaattagctgggtgtggtggcaggcacctgtagtcccagttacttgggaggctgaggcaggggaatcacttgaactggggaggcagaggttgcagtgagccgagatcacgctactgcactccagcctgggtgacagaatgagaccctgtctcaaaaaaaaaaaaaaaaaaaaaagagtctcactctttcacccaggctggagtgcagtggcatgatcttggctcactgcaacctccacctgcagggttcaagcgattcttctccctcagcctcccaagtagctgggattacaggcgcatgccaccacacccggctaattttttttttttttgtatttttaatagagacggagtttcgccatgttggacaggctgttcttgaactcctggcttcaagtggtctgcccaccttggcgtcccaaagtgctggcattataggcgcgagccaccgtgcccagcctcaaatgacttctttccaccaacttccatcccagccaatatcaggctgacttggctgctatatccctgaggacaaggctgaacccctctaagtaggcatctgttgggcgggcaatctcccctgtcttctactaatagcacttttttcccctggggagaacagccactccccaatctcagtcttgggttcaggcaggactccacagtgggcacatggcccggcctggaaaataagagtctccattcctctctccacagtgattgtttagacacaggcatttgacccaacgtgtgtttttaacaaaacatttaggacaattctactagctgtcaagaagatggaggtggaggagggcttctctgcccctctgattgaagaaactcagaaagaagccaccacagatgaaggcaaagttgagagagggtgagaaacagatcgctggtgagatttttgagcacctgaaagtggccacacttggaattttttatttcatataccaagactttttcttttttttcttgagacagggtctcaactctgttgcccaggctgcagtgcagtggcgtgagctcggctcattgaaggctcaacctcctgggctcaatcaatcctcccgcatcagcctcctgagtagctgggactgcaggcatgcactgccatgcctggctaattttttttgtttttgttttatagagatggggtttcaccatgttgcccaggtttgtctccaacgtctgggctcaagtgatctacctgcctcagcctcccaaagttccgggattataggcatgagccactgtgcccagccaagccattctttttcgtgttgacaaaacagctgcatttctgtcacttgcaacctttttctcgggctctgaaggggatttttttgccaaatggttgcaatcatctcccagtagtcacatccttgagtgcggggcctttccacactgactctgtgttgagccatgtgacttgctttggccaatgagacacaactatgacggaatcagctagtaaattgctgcttttgacccccgtgaccacctccatgtgaaaaagtcaagaagagacacgcgcccagttatctccattgttccaaccaagagccagatgactatcagaagtgtgggaagggggcaaccctagaccacccagtccagtggagctgccagctgactgcagagatgatttaagccagcccagaccagcactgttccgccagactcagaatcatgaggaagaatgttgctataagcacccatgtttggggtggttcattatacagcaaaagctaactgatgcaggcttcttacaggacatggagtgagctaattcttacggaattaaactaaatttggaagagaagaaaattta[140 bp omitted]gaaacctcatctctactaaaaatacaaaaaattagctgggcgtgttggcacgtgcctgtagtcccagctactcgggaggctgaggcaggagaggaagccgggaggtggagatagcagtcagccgagatcgcaccactgcactccagcctgggcaacaaacagagcaagaatccatctcaaaaaataaaaaaataaaaaaaaaaaatgccgagtgccgtagctcatgcctgttatcccagcactttgggaagctgaggcaggcagatcacttgaggtcgggagttcgagaccagcctggccaacatggtgaaaccccgtccctactaaaaaagtacaacaattagccaggtgtggtggcaggtgcctgtaatcccagcaactcgggaggctaaggcaaaagaatcgcttgaacctgggaggtggaggttgcagtgagccaagattttgccacttcactccagcctgggcaacagaatgagactctgtctcaaaaaaaaaaaaaaaaaaaagaaagaaagaaagaaaaaagaggaagctctaaggagtctgcaagtctgcaattctgcagggacagaactaagtcttttttttttttttttttttttttgagatagggtctccctctgttgccaaggctggagtgcagtggctcagtcatagctcactgcatcctccaactcctgggcttatgcaatcctcccacctcagccttctgagtagttgggactacaggcacatgccactacacccagctattttttatttttgcaaagatggagtcttgctatgttgcccaagctggtctcaaactcctgggctcaagtgatcacatgccttggcctcccaaagtgttgggattacaggcgtgagcgactgagcttggccagaactaagtcgttaagcagctgtgactacaagcagaggaggtagggtcagagaccaggaggttccattctcaggggagccgggagggatcaggggactgaggacttgcctgaaggtggctctgtgggcagctggtcttcaggttctccagaaggctggtggagacctggggggtggatatacagattgtgacttaacactaagaatctgagataagctttaaatatttctcagcctcttcttaagcctattagattcatgggaactggtatatgactgcttaagaatatttcaaagagagctagaaattgctgataataatgacaatactattaatagcaattctaatggtaacgctaatgctaagaataatttgttttttgagactgaacctctctctattgcccaggctggagtgcagtggcgcaatctcagctcactgaaacctctgcctcccgggttcaagcaattctcctgcctcagcctcccaagtagctgggactacaggcacctgccactatgcctggctaattttttgtatttttagtagagatggggtttcaccatgttggccaggctagtctcgaactcctgacctcgtgattcgcccacctcggccttccagagtgctgggattacaggcgtgagccactgcgcctggccatttttttttttttaaagagacagggtctcactctgtcgctcaggctggagtgcagtggtatgatcatagctcactgcagcctcgacctcctgggttcaagctatcctcccgcctcagactcctgattagctgggactacaggcatgcatcaccatgcctggcccaaaaattaactgttgatgagcactttcggtgtgcaaggtccttttcacccgaattatcaatttgttgagttaaccaaaaaagactttgggctctcgatcccttaataaaggtacaagttctaaagcaaaggaggcaagtgtcatactttatgttttagtgttcaaagggaagactggagtggggtggggggaagagcagagaagattgtaggggtgaaaaagtgtccttacttccattgagaaaaagcctgctctgtcaggaagaggaaaacagaaaggagaagcttgcggccaggagtggtggcacacgtctgtaatcccagcactttgagagactgaggcaggtggatcacctgaggttaggactttgagaccagcctggccaacatggtgaaaccctgtctctactaaaaaatacaaaaattagccaggcgtggtggtatgcacctgtaatcccagctacttggaaggctaaggcaggagaattgcttgaacctgggaggcagaggttgcagtgagccgagatcatgccactgtactccagcctgagtgacagagcaagattccattgcaaaaaaaaaaaaaaagaaagaaaagaaaagaaaagaaagaaagaaagaaagaaagaaagaaagaaagaaagaaagaaaaataaactgagccacaaagatctgtgctatatatttttagaaactgagacacttgcctatggtcacacaactaagaggtagcagagaggggatttgaacccaagcttctctggaccaggctctgaaggatttaccactacaatactgtgcctatcagaattgtaacatattcatcatattcaaggaatttgtccttctcatccaacttgctgaatttattggaataaagttatccataatattccctaattatcctcttaatgtctgtggagtctgtggtaacatcccttcttccattcctgttattggtaacttgtattttctcccttttatttgtcttaatcagatttataaatgttattgatttttttcaaataaccagcttctggtttcattgattttctcaattgtttttctgttttctaattcattcatttctgctcttaccattattattttcttctttctgtttactttgggtttaatttgttcgtcttttattagcttctttctttctctctctctctctctctctctttctttctttagatggagttttgctcttgttgcccaggctggagtacaatggcaccatctctgctcactgcaacctctgcctcccaggttcaagtgattctcttgcctcagcctcccaagtaactgggattacaggcatgtgccaccacacccggctaattttgtattttcagtagagacagggtttttccatgttggtcaggctggtctcaaactcccgacctcaagtaatacacccgccttggcctctcaaagtgctgggattacaggcatgagccacagtttcttaagatgaaaacttagaatatgcatttgaggttattctcttaaaaaaaaaaaaaaaaaaaaaacgaaaactagtccagtcgtggtggctcacacctgtaatcccaacactttgggagaccgaagctggtggatcacctgaggtcaggagttcgagatcagcctggacaacatggtgaaaccctgtctctactaaaaaatacaaaaaattacaggtgcatgcctgtaatcccagctacttgggaggctgaggcaggaaaattgctcaaacccaggaggcgggggttgcagtgagccgagacggcaccattgcactccaccctgggcaacaagaacaaaactgcgtctcagaacaaaaacaaacaaacaaaaagtggccaagcgtggtggctcacacctgtaatctcagcattttgggaggccaaggcaggtggatcacctgaggtcaggagttcaagaccagcctggccaacatggcgaaaccccgtctctactaaaaatactaaaattagctgggcatggtggcacttgcctgtaatcccagctacttaggaggctgaggcaggagaatcgcttgaacccgggaggcggaggttgtagtgagccaagatcatgccactgcactccagcctgggtggcagagtgagactccatctcaaaaataaaaaataaggccgcgcatggtggctcaggcctatgattctagcactttgggaggccaaggtgagtggatcacaaggtcaggtgttcgagaccagcctgaccaacatggtgaaaccccgtctctattaagaatacaaaattagctgggggtggtggcacatgcctgtaatcccagttactcagaagactgagtcaagagaattgcttgaacccaggagatgaaggttgcagtgagccaagatcacaccattgcactccagcctgggcaacaagagtgaaactccatctcaaaaaaataaaaaaaaattaaataattaaataaaataaaaaactaaaataagcacttaatgctataaatttccctctaagtactgctttaactgcaacctcaaatttttatatgttttcattttcatttaattcaaactattttctaatttcccttggtcattaatcacattcagatagtatgggttgtggttaacggttggtctcaagttcatctgcctgagtttcaatctcatctttatcttttactagttgtgtgaccttggacaatttgcttaacagctataggcctcagtaactcatcataaaaggggaatagtattgacttcaccatactaccctacacatcctctgaggaatactccaacctgcccaagcctcccttcccacctggggtagtgatgggaagctgggtccctttgtcagccagtccactgtcccccaaggcattactggccagcagccagaccctgtatcttgtagaaggctgtagaccagtcagcgtgaaggtggtggcctggggtggtacgacatccacatagtggaaccctggagtccccagggcctcatacctgcaggacagggggatagtaaattcagggaagtgccctagcccattcccttccctcctgcctcgacaaggacccacctgatgcagaacctctgtggcaggcccccatcaaagccaggcttccactccagccccacggagtgtggggtcagactcacaacctttaatcctgatggagggtcagggcggcctatggggagaaagatgggaaagcagtcagaggatacaaaagaattccagaagattctgtccaggttttccctaggaatgattttaaatatacaatcgcttctcattgttcatagcatactcatgttctgtaaggtcatggtgaacactgctctggcaaacaccaaactgtccctgtaatcccagtactttgtgagaccaagtctgaaagatgcttgagcccaggagttcgagaccagcctgggcaacatagcaagaccctgtctcaaattaaacattaaaataaaaaataattttaaaaagaagtaagtgaaaacaaaaccaaaagaaacagcaaaaaaattcaagaccaaatggttacttctatggaaaatgaagggttaagtttctttctttttttttttttctttttttttagatggagtttcactcttattgcccaggctggagtgtagtggtgcaatcttggctcactgcaacctccacctcctgggttcaagcaattctcctgcctcagcctcccgagtagctggattacaggtgcccgccaccatgcccagctaatttttcatatttttagtagagatggggtttcactatgttggccaggcttgtctcgaactcctgacctcaggtgatccacccgccttggcctcccaaaatgctgggattacaggcatgagccaccgcgcctggcatggttaggtttcttttcttttttttttcttttcctttttttcttttttgagatggagtctcgctgtgtcacccaggctggagtgcagtggtgcgatcttgactcattgcaagctctgcctcctgggttcacgccattctcctgcctcagcctcccgagtagctgggactacaggtgcccgccaccatgcccggctaattttctgtatttttagtacagacgggttttcactatgttagccaggatggtctcgatctcctgacctcgtgatccacccgcctcggcctcccaaagtgctgggattacaggtgtgagccactgcacccggcagttaggtttctttaaacgtctcatcatagcatttgcgtcaagcaatcaatacatgatttttttttttttttttgagacagagtcttgctctgtcgcccaggctggagtgcggtggcgcgaactcagctcactgcaacctccacctcctgggttcaaacaattcttctgcctcagcctcccgagtaactgggattacaagcgcatgccatcacgcccggctttttttttttttttttaagt[131 bp omitted]agagaaagaattctgtttcctctgggaattctaacagaccactgtgagggcccttagaataaagccaacacagagacatgcagacgtaagaatgaagagggctggtcatcacacctgtaatcccaccactttgggaggctgaggcgggcagatcacctgaggtcaggagaccagcctggccaacatggtgaaaccccgtctctactagaaatacaaaaattagctgggtgtggtggcgggcgcctgtaatctcagctactcgggaggctgagatgagagaattgcttgaatccaggaggcagaggttgcagtgagccaagatcgcgccatcgcactccagcctgggtgacaagagtgaatctccatttcaacaacaacaacaacaacaacaacaacaaaaagaatggagagttgctgatggcagctgaacctagatccagaaacccctgaaaatctatttttcagttacttgagctaacaagtaccccctctccatcttttttctgttcttttctttttcttttgcctttgttgtgggtcttcctgaagatccagtctccattaggattttcagggcaggcaaaaactccatcctcacacatacacagaacttccggtttcagaaacatgggcagcccagggccaatcagggatgtgggaatggatccagggagcaccccctccccaacaccctcacagcccctccatactgatgctgacaagttgaatgttggtttggtccgagccaagggcgttggtggctgtacatgtgaagagggcgtaatcctgggcggcagacacgttggcaatggtcaggaggctgctgtggacaccaccctggtggtatgtgtgctccgtgtacctagagagaaggtagggcaccactcacccttccattcacccaaccacttatgcttggaatcatctatgcatccatccattaatgtaaccgtctgcctatctatccattcatccatttatcttttcatccactcaaccattcactcactcattcctccacccattcgtcttccttctctgcagggactcagggaggggaagtggggctggaggtccagacctggggctggagtgctgcctggctgggcttgggctcacctgggatcttggagatccagagggaccccgttttttgtccaagtgaaaacgatgttggggacacctcgggcacggcagtggagggtggcagaactggtgctgtctccagctgcagccaccttagttaggggagtggggtgctccacctggggggcaactgggaggggatgggcagtcaacatgagctatgtgggagacatgagggctgtgggttcagtggcaggtcttgaagtcaggtgtttgggtaatacccacatctgacaacaagacggagcagccgtcgtgctggaggcgccaccccattgtccacaatgcactggtaagcgccagcctgggccagtttggcatggtgaatccgcaggcgccccgttggtcccctggatatcttctccatgtcatccaggctctggtcctcctcatcttctccctggaggcccaagagtccagaattggcctcccagtctagccccagatccatcactgcccaaattgtcccttctgtagcctcattctcctagccacaatcaccctccacagaggtattgaagaaaaaaaaattctcctgtcatccatctatccatttactcaatccatcttttcatccaccaatccaggcaaccacctacccatccattcacccaaccacttatgcttggaaccatctatccgtccatccattcatttatccatctgcttatctctccattcatccatttatctttccatccactcatcggttcactcactcattcctccacccatttgtcttccttctctgcacccatgtatccacccctgtagctctccacccattcactcaactattcactcacgcttgcacacccataaatacatgcatctgttcagacatttacccagctacctatttattcatctttccattgatctacccacccatccattcatcaattcatccatcatccttccatagatatctttcctctgatggtgtatccgtccatcatctaccctctatccactgatttttctccttcaatcatcttcccacccatccactcacccatttatccatcctttcacttgtccatctgttcctccatccactcactcattcatccacctgttcatccacttacctaccttttgacctatctatccatctacctacccactcgcctggctgtctagccatttatccatgcattcattttgccaccaacagttattcattctgggagcatgccctggcgagtatatagttataagggtcatacagatgtatgtggtccccactcccaaggaactcacagtcaagaaaccacaaccccttgaccccacctctattcaccaaaggctggatcctcaccagtctctcccagttgaacatgcccgggaggatgggattggcatcgacagtgcagactatgtccacagaacccccgacgttcacctcagtggggtcctggagggcacggatggtgggagcatctggtggaaggcagaggcttggggaagacacttgggcccagacaggtctgggtgtgagagggccccaggtgggagggatgtcttaggggttccaggaaagttatgggtgtggacacaatctgcccttaataccaaagggttggaggagagttctcaaggttggtgaggttgtctccaccctccactatgcctctgtgataattagagtgagttgagtgggcttccagaattgtgtgtgtagcagggcttatacagtgggctctcattcctgacgggagcagcttccgtgtctaggcgggcaccctctctgggcagagattccacactgggtctctctagtgggaggggttccgcagtgggcgtggttacaccgcggctgggacttccagaacgggagggttccaggatgggtggctatccctgggtgggcggagctcccacaatgaggagactccacaatgggcaaggttccttgggtgggtgtggtttccatggtgggcggggctcacagtgcacgtccagccgcagccgcgcttccgcggtgccctcagagttctggcagtgcagctgatagaggccgtcgtccgcgcgggtcacattccacagatgcagagccccgctggacaggatgcgatgccgggggccgcccgctggggaaggccagaataagggacctggcaggacctcccatccccgggacccctccccatgaccacttccctcacctggactgaggcgatagccgcggaaggtccagttgaaggcctcgggggcggggttagcggacacggacacgggcagcaacgcctcgccctgctccaccgcggtcaccaccagcacctgctcccccaggaactctggacggtcttcagagggggcgccgcagggagtcaagattgttgttaaggttagggtcaaggacagattggagatcaggcacaggttcaagggttaaagttggggtcacgacggggtttaaggttgtggacaaggtaacaagttcagagctaagctcaggggtaaggttcgggatagaagttagaatacagtttaggaaaagagcagaagccagggtcagtttgaaggatggaaacaggagtcatgaggggggttaggagagaggacaaatgcaagatgggaggaggcaggataggagttggcccaggaccacgggtcaggatgaaggtcgggagtttcaagtttcaggatggggttaatgatagagtgatagtgtcaaagcaaagacccaggccaggtgcagtggctcacgcctataatcccagcactttgggaggccaaggcaggaggatcacttgagtcaaggtgttcaagatcggcccgggcaacatagagtaatgccatctctatttaaaattaaaagtacaaaaaatcagcctagcatagtggcacgcgcctgtaatcccagcactttgagaggccaacgcaggagaactgcttgagcccaggggttcaagaccagcctgggcaacatagtgagaccccgttgctacaaaaagtaaaaataaactagcgaagcgtggtagcgcacacctgtagtctcagctactcgggaggctgaggtgggagtatcacttgagctcaggagttggagactgcagtgacctatgattgcgtcactgcattgcagcctgagcgacaaaaaatgaaagagagagagagagagaagagaaaaagaaggaaaaaaaggtaagacccaaggagtagtttagggtcaagaaggcatcgagaggggctttcaggccggggcacatacacagtacgttgaggcgatagaaggagctcacggtttcgcggagctcggcgctgtgggcgcggcaggtcacgcgctggccatgatcgcgggatgacacttgcagaaggacgctcctggcggcggcggagcctttgaatggggctctccggggtggggcggccacgccctccagcctgtggaaccggggtcaagccagggctgcgagcggagccagaggctggagaggcactaggcgggggcgggacatgcgtggagggggcgaggccagaccagagaggggagggatccctcgcactcccacctctccccttccttgtcccaggacaagttgaccggcggattgctgctgacgctgacgcatgtcaagtttaaggcgtctcccgggcgcagtgcggatgcgttggccaggatcgtcacgttagttgggggaactgggagacggggttggaggagcgagactcagaggttaggggcggcctggtctgcgtccaccccgcctgcaccccaggctccgcccagtctcgggtcccccaccccgcctccgcccgctttccccgggtccagggttcgctgggtccctgccccacctggctctgtccctcccgccccgcccccgggcctcagcagtgcgagccctcacactgcaccgccagctgcgtggacgcgctgagctgtccagccttgcacgtgaacttggcctggttgtccgacggccctgtgaccagcaccagctctcgggagaaggtgctcccagatttctccacgctgccgagatgcacgcgccgcgactcctgcggcagccgcgactcggtcacggtgcgcgagtcctacgggccgggagtgactggggttcgcaggcagccctgccgcttccaccaacccccaacccccctaccctgcccactgggttggtgccgccagcccaaacaaagcctttttctgataaggagaagcactctcatcagcaccacccccctagggcaaagcagtggggagtggaactgagtgaccccctccctggagtctctcccgcctccccgagtccctgtgcatggcagttttggggatctgaatccgccttctgtcccacacccaactcctgctctgcctctgcagccacctgcaggctctcagcgcactcctcaaaatctatttctgctgtgtttacccaacaccacctgcaggaaactcccttgaaattcccaggcctttcccagagttcctcagttccttttcttaaaattcctgctgtccccaaagatttcctttgaaattttccttaattccagtgtctttccatagattacttcctttttttattattgctgctgcacaaattaaactttccatagatttctgaatctttcccgatattataatatcttatgatcccagtcttttaacagattcctttgtattgcccagattctcagcacttccccagaattccatccaattaaaataaaattccattgtcatttctataatttctagtcttccccccaaagttttcaactagctccctaattcccaggattctcctagaattctattaggcttctctttcattttaatgaaatttcattttcttgcctccaaatcccaagagttcagtttaatactaatgaatttccgatagtctgtggaattactagcttttctccaaattttcttttcttttcttttctttttttttgagacggagtctccctctgtcacccaggctggagtgcagtggcacgatctcggctcactgcaagctccgcctcccgggttcacgccattctcctgcctcagcctcccgagtagctgggactacaggcacctgccaccacgcctggctaattttttgtatttttagtagagacggagtttc[140 bp omitted]cggtctcgttgcccagactggagtgcagtggcacaacctcggctcaccacaacctgggcctcccggattcaagcaattctccagcctcagcctctccagtagctgggattacaggcccccgccaccatgcccagctaattttttgtatttttagtagagacagggtttctccatgttggtcaggctggtctctaactcccgacttcaggtgatccgtctacctcggcctcctaaagtgcttggattacaggcgtgagccactgtgcccagccaaattttacagcattgttttttttttttttctgggattcaagtctttccctaaaattcctgacatttcacctgaattctgagggttttcactagaattttctttaattttaatgaaattaccttttctctagaatgcctaatcttgattcagaattccaatttttatcctaaaattctcactgtttccccagaattttcctaggattccatttaattctcatagcatttgtgtctttcctgattccctgccaaacctcagaatctttagtacttttcaagaaatttaatctttttccaagattgcccaagattctgaaggagagaaggggcctggtccttcccccacattcctggccacccccatagccctggcgtggcaccaaccttgtaccacatgagggagggctctgggttgcccccgatagccaaacacaccagcctcacccgggtcccagcccggagcttctggccctctgggggaccctcaatccacagtttctgggcgggatctggcggggagaggaaggaagaatgactttttctctgtgctgggtcctgaggcttgggggcattgctgggccagggcaggggctcacattttacgttcaggatgagcgacttcttgaaggtctccttggtgaaggcttcactgaaggcctcacatgtgagggtcagaccgttgtcctcccgccgcgccaggaatgtcaggttggacatggagatgtgaccgccatgcagtccctggcagggagtgagcttcagacgtggggactgcagcacccctatccatcgtgctagaggcctgagtccatcccagtccccagcagggacacaggagacatctctacctccccctctgttggacccatggtcctcaaggagaaagccccccaggctgctggacccaccccttccctatccacgagtcatgccctcagccccctccatgctcagacccaggagcctggcccccgcctcacatccatgactgtctcctccatgggcagcagctgccgccagcccagccaccatcgtagcagaacccgcgggcgactggacttgctgacacaggagagtgtcacgttcttgttctcagtctgggatgcagatcccaagataataatggcactagggggaactgcagggacagagaaggaagacactaagctgggctggatttctcacagaccagcccagacagaacaggactggagacagatgctgagatctttggcatccagtaggcataatttgggggcacacacagatggttctctgaggcacagaccgacaggggggcagctggcaccaggactcacaggtgacctgcagtgtgatgccgtgctcctgggtccctgcagacacgctgttgtgggcctcgcagctgagctgcgctccatggtcttctggcctcacggtcatcaccagcacactgcgggccaccgcctgggtgtgctctgtgccccacgctgtggacaccggctggccattctggagacagggacaggcctgggccagctcaggactggctcccagaccccactgtccccccattccccatgcccgcgtttgccctcaccttcagccactgcagtgtggctaagggattaccccctcgggccacgcacggcagctccaagctctgtcctgcccgcacgtgcccctcatccaggcctggccactcgatgacagggggtcctggagggactgggggatatcagtcactcagtgggcctggagtagcccatccactctttccaggccccacaacctgcctttgaacccccatgtttctctgagtgcctgaatttccataatccctgtgatccccccacaccccccagtgcctgctccccatcctcagcgccctagttggcccagttctccacttacacagaacattcacggtgaatgaggccttgatgggggcctccagtgctgggctagacgcctcacagaccagcaactgcctattatctgagctccggggtgtcaccctgggatgagaagtcagggttatagagtcagagtcatcatctgaaatttggggagtcagggagaagaggtggggatgtcacctctggtccccacacctggtctaagtccccatgctgatctcctctgggatccagggttccatgggagagattttgggggtgaacagtgagaattggagcctagagagccccacatctgaccaaaactttagtgcttgggactctagaactgaggttcccatgaagtttttttgtttgtttatttgtttgtttgtcttttgagacagaatctggctctatcacccaggctggagtgcagtggtacaatctcagctcactgcaacctccacttcttgggttcaagtgattctcctgcctcagccccctgaggagctgggagtacaggcatgcgccaccacacccggctaatttttgtatttttagtgaaaacagggtttcac[131 bp omitted]agaattgggtcccagatgttcatacctagcccaagcttcatgcttgcatccctggggtctggggttcccatggggaaaattaggggtcaaggttggggggttgtttcagtttccacacctggctgtggcctccacagtgaagagtttctgctgggagccctcgttcacgtttgcagagatgtcagatattgtctgtccaccttggggcagcaagagggctagaggggttccaggctccccgcaagatagattctggggagcatggcctggaagtcctcagggtgggtgcgatgccccctccctcctcgttctagaggaaaagggcctggggcagagctgcatcccctcccgactttctggactgcctgaatgccgcagtcttcagtgctgggtcctgggcctccccgctcttctcaactccttgctgggttgtaccatgcaccctatccctcagcttctcatgtctgcaccagcgctactgcccatatttctatctgggcctcagccttgtgctggttgctgccgccctcgatgtgccctcgcatccactgggtcccacactggcctcagcatctccccacaccttctcctgggtccccatcccagggatgacatcttttctggggcccttagaagggtactggtcaggaacacacacccttcccactccagaggcttcatgctgccccctgccacccagttcacccacactcactcaggagaatggtgatgtcaggtgctggcttcgcgtccccagacacacagttgaccacgtactcctgcccagctacccaggtgaccatggtgcctgcctctggggtcagcaggagcagcttgggaggaactggtgagagaagggtctggggtaagcttccagcactgagaaggacttgaagattggagttcggtacccagagtctgggagaggagaggctgggggcttggacttccgggttgcggggtaggggagggcttgaagcccagactcatgggtcctgggcgtctctcacccatacccaggatggagaggatcactctgggagacacgagctcgggccccatctcagagcggccgacctggcactcatactccgcgtcatcgctgaggtcacaggcctcgatgtgcaggtggaattcacctgcagggggagccggaagtcagggccgcagcttccgctggtggctgagggtctcaggctctgatcccttacctctagcagggtccccttccaggcggtacctcgggaagcctgggatcctggggtcggggcccaggagcagcccatctttggcccattgcaccgcactgccaggggtgctgaccccacaacgcagctccactgaggccccctccaccaccgtcaggttttcaggcagggcccagaagccccggggaacggaggcaggaatcgccaactgcgccaggcctgaggacacagcgcggtgcaaggaaagggcagagggtttgtctagggaaggtaagtgggaaatgggggccacttggcgctgggtacaaggctgggatcccactcaccttcagtcagcagccccaggagcaggagagaagccctgagcgtcgtccccagggccatcacaggtccccctactgtgacccccacagcgcccgctgccagccacctgcgtctgtctggctttctctgggtccctctctgtgtgtctctgccacctgcttttcttttttatctctttccgttactctcctccctttctcgttttcctcttcccctcttccctgtgagtatctctctctgtcttgctctcagtctcaatctctgagtctctttctctgtctctttaaaaaaacttttttttcttttttcttttttttttcttttttttttttttagagacggggtctcactatgttggccaggttgatctcagactctttccttcaagccatcctcccaccttggcctccccaagtgttgggattacaggcgtgagccactgcgcccagtctctttatctttccatctttctctccttgtctaagccgttctctctccttttgtctctgtctcttcctctctctctgtctctctctctctctctctctcaatctctatcttctctcctgccacccctcactcctgctccttgtctcactactcacagcctttcaagaaggacctgcagcccagagtccagcaggccaggagcctaggagagcgatgaggctgatgcaggcactggcagagtcagccctgctctctgacccagcttgagctcattctcacagtgcaacctcccccaggtaccttccagagcccccagctctggcctctgcccagcaggctcctcccagctggcccagctggagcataaaatcccctgtcagcacatgccaggcgcgttcctcggtgcctccccagcctccgtgaccccagggcctggcttaggctgggaagatgggagaagtcagatcaaggtggtctcccagctcagcaggggagcagccagctgggcccccagctcttccttgccctgatacatgaccttggcaagtctctttctttctttctttcttttcttgagatagtcttgctctgttgctcaggctggagtgcagtggcatctcggctcactgcaacttccacctcccatggcttgaacctcccaggttcaagtaattctcccacctctgtctcccaagtagctggtgctacaggtatatagcaccatgcctggctaatttttgtatttttactagagacggggtttcatcatgttggccacgctggtctcgaactcctgacctcaggtgatccatctgcctcagcctcccaaaatgctgggattacagacatgagccaccgcacctggcctcccttccttttttagtagacatcagtgcctaaatgatgtcagggatctctgctggggaggatgcaagagtgagtgtgacaggctgggagagtgtgggagagagggaagatatgcatgtgtgtacgtgggtgtgagagtggggaaggttagagtgaactgcgatctgtaataagcatgtggagagcgtgtgtgtgacagtgtcttacgtgggagtgcacagggtgtgggcgggagtaaaaggcagagtccaattccaccggcccccagtgtgggtgcagtgtgagcccaaagtgggcgccctttggcaaggactgcatgagctttcttctccctctttttcttgccctctctcccatctcttctttccttctccatgtctctctctctccctccctctatctatcttgatttatctttctttcttttgagatggaatcttgctctgttgcccaggctggagggcagtggcatgatcttggttcattgcagcctcaacttcctgggctcaggtgatcctcctgcctcagcctcctgaatagctgggactacaggtgcacaccaccactccagctaattttttaaaatttgtttgtagagacagggtctttctctattgcccaggctggagtgcagtggtgtgatcatggctcattgaagcctcaaacctcctaggctcaagtgttctttctgcctcagcctcctgagtagctgggactacaggcccgcatcaccactctggctatttttttttttttttttttttttttgagagggagtcttgctctgtcacccaggctggagtgcaatggtgcgatgttggctcactgtaacctccgcctcccaggtccaagcgattctcctgcctcagcctcctgagtagctgggaatacaggcattgaccaccacacccagctaatttttgtatttttagtagagacggggtttcgccatgttggccaggcaggtctcgaactcctgacctcaggtaacccacctgccttggccccccaaagtgctgggattacaggtgggagccgctgcaccccgccacttggctaattttttttaaatgtttttgcagagacagagtcttgctatattgcccaggcttgtctggaactcctgggctcaagcaatcctcccatctcggcctcccaaagtactaggattacaggcatgagccaccgcacctggcccttgatttatctttcttttttttcttttttctcttttttctttttttgagatggagtttcactcttgttgcccagactggagtgtaatagtgtgatctcggctcactgcaacctctgcctcccgggttcaggcgattctcctgcctcagcctccctagtagctgggattacaggcatgcgccaccacgcctggctaattttttgtatttttagtaaagacggggtttctccatgttgatcaggctggtctcgaactcctgacctcaggtgatcagcctgactcggcctcccaaagtgctgggattgcaggcgtgagtcattgtgcccagctgatttatctttctatctttctccatctgtttgagactctctcgctctctatattaagttgttaaatctcagtcaatctttatttcactgtgtctctccatctctatatgtctctgttattctgtttctctgtctctgttctcacctctgtcgctcccctcaccccacagtctgtctcacacacaccaggagctccataaatatttgttctcagccacactctgaccacgcctctttctcttatgtgtctctccatctccgagtggctctgctcatcacatccctggattttataaccatatgctggtgggcctgccctccccgcgtgcacatacacttgcctgggataagcttcttctgcctgcttatctcctgcgggaattggaaatgctagttttctccctacctccccaagacccccgccaatatcgttcccaggaacaagatgaggcatctggcctcagcccccagcttcatcctcgatgctggacttccatcttccctcacatgcttgactccttgccctcctcccacctcccctctcccaactgctctctacaccccctgggaaatgggctggatgccgagctgggggagtggctctgtcctgggggccctcgccagatggtgtccctaggtgccagagcgtggagctgtcccttgctggggcctttaataagcacaaaccttccaccctccaccttggctgttttccttctctgcatgctcctgggaccttgggctctccatctttccatgtccgtagccccagagagccaggaaggggaagcggcgtcaagtgcctggaaaaacagccccatgacttgagttcctccctaagactcaggagttccagccccatgtccatcctatttcaaaatccaggcactagataagccacacagaagccgggagtgtaggcccccagatccctcccctctcagaccctggggtctcagtcccttctctccaaggactcgggaatttgggcctctgatcctcctggccacactacccacccccgcacctccccatacacacacacacacacacacacacacacacacacacacacacacacacacatacacacaggacttaggacagatgttcacggtctgatttccaaatcctcctgggcctgtgtgggggtggggagagattggcagatagatccaccgactcttaagacttaagaccagatattctgacccctgtcaccctcttccaagtgcaccatgcacttgagtgcaccttgagtctccagcctctcaaggaaccgggagatcaggccatcagcgtctcagccagcaaaggcctgaaccaccagtcccttataaccctgtaagtccaacccccactcccaaccccactcccccatttagggacacggagtctgagcctaagaacagtggagaatctgaatgtggaccctccagttcttacaggtccaggaatgtcagatcagggtcccagccccccagccctccttcaggctgctcggggtccctcccacctgctcggccagctgcgcagcgtgggaacgccccagctgggctgcatggagccgtcaggacaagctgcgcggttcccagcctccctgcctgccccggcccggcaccgccgcctcccagccgtcgccgggcaaccaggccgaggggcccggccggccgagtggggagaggggttgggctgggactgcggggtcctgggaaaggaggggccgagggcctggattcctgggtcttaggacgtgctgtagtttgcagcaataacaagggaacagagggatattttgaggaggggttttgaggctgggggagtcgaggtaggggtcccaactgtcccccaggtatcggtgtgccctcttcccgacacgcaggcccgggggagccccggaccccgcatcccccagggcgcggaaactggcgaggccccaggagctcccatttatagctcagtttccactgagcgcagtccctctaggacctgggctgagcaagtttcttccactctctcccttccctcctcctcaccccttgcctgcccctcaaccccggcagggcgcaggtgtccaacccagccgggaccccctccctcctcgaacccaggtgttccggctcccagaccccaattgagctgggggcgcccacccgccgggggatcccgccctgcgtcccccattcatccgcgtctcagccgcgggagtttctcaacgggaagagggcggagctcccggggggcggacccgggcggggcgagcgggatcgggccctcttggggtctcccagagacccaggccgcggaactggcaggcgtttcagagcgtcagaggctgcggatgagcagacttggaggactccaggccagagactaggctgggcgaagagtcgagcgtgaagggggctccgggccagggtgacaggaggcgtgcttgagaggaagaagttgacgggaaggccagtgcgacggcaaatctcgtgaaccttgggggacgaatgctcaggatgcgggtccccgccctcctcgtcctcctcttctgcttcagagggagagcaggtaccgcacgaggggagcggaggaatatggggtgggggtggggagttgcttgcgggctgcctcttcactagcgagaagggagctgggggctgggactcctgggtcctgaatgaggaggcccctgaaggtgctaagctcagccctgctgccccgaactctcctaggcccgtcgccccatttcctgcaacagccagaggacctggtggtgctgctgggggaggaagcccggctgccgtgtgctctgggcgcctactgggggctagttcagtggactaagagtgggctggccctagggggccaaagggacctaccaggtaagagtgttctctccacgctgggacgggctggctagggggagagttgctgggctcggctgtacctgcagtttctattttgacattttcaagtttgggaaattgatgggctcgggtaaacatttaggagtcctgatttttgagctgcttctttgggggtgacccacggagtttgggaattattatgttattgcaaaatagtacataggccaggtgcagtggctcacgcctgtaatcccaacgctttgggaggttgaggccagaggatcgcttgaaaccaggagtttgagaccagcctgggcaacataacaagaccttatctctacacaaatgtatatatatattttaaacaaattagccgggtatggtggtgtgcatctatagtcccagttactcaggaggcttaggtggtaggattgcttgagcctaggagttcaaggctgcagtgagccatgatcaagccactgcacttcaggcaatggtgagaccctgtctcaaaaaaaaaaaaaaaagagaacataaatgcaaaaaagtacagtaaatataaatggaagatttaccaaataaaatagacacacacagccaatacccaagtccattgctagctccccagaagaccccgtgttcctttcccctatcatagccccctccccctcactccagaagtagtatctaacctaatttttatggcaatcattttcttgctttccttcctgactttattacccctaagtttgcagtgactctgggttgggagggagttagagtctctctgggcccagtacacactttttaatagtgtcttaccaccaaatgtgtgggccagttttctggtggaggatgtctggggatggaggcctgaggccaggatttcagaaccatggtgtgctgactgccttctccctgactccagggtggtcccggtactggatatcagggaatgcagccaatggccagcatgacctccacattaggcccgtggagctagaggatgaagcatcatatgaatgtcaggctacacaagcaggcctccgctccagaccagcccaactgcacgtgctgggtaaggacctcgcccacttgtcccctgggagcccaagagggcagcccgtactagctgtgagtagcagagcccagggagcccaggggcatggtcaattggagctgagaagatcaggatccatctctgaccccaaatccaccttgcagtccccccagaagccccccaggtgctgggcggcccctctgtgtctctggttgctggagttcctgcgaacctgacatgtcggagccgtggggatgcccgccctacccctgaattgctgtggttccgagatggggtcctgttggatggagccaccttccatcaggtcaggtccaaattcctgtgctagcctttgcccattgagggaaacttgggttacactctgaccacaggctcatccagaagagaagaagacatgggagggcagaggttcatgggtttggactcttgaaatatgatgcagggtaaagattctagggccagactacctgggttcaaattatgtctcagccacttgctagttgattgatcttgagtaagttagttaacctctctgtgcctcagttgccttatctatacaatcaggataatagtagcatgcatgtcatagggtattgtgagaattaaataaataaatacctataaatgcccagaagagtgaccaatacatagtgagcactatataagtaaggcaagcttgtccaacctgcggcccatgggctgcatgcagcccaggatggctttgaatgtggcccaccacaaattcataaactttcttaaaacattatgagacttttttgtaattttttagctcatcagctatcattagtgttagtatgtgtggcctaagacaattcttcttccaatgtggcccaggaaagccaaaagattggacacccctgatgggtagatggcattattattcttatccttccctccagaccctgctgaaggaagggacccctgggtcagtggagagcaccttaaccctgacccctttcagccatgatgatggagccacctttgtctgccgggcccggagccaggccctgcccacaggaagagacacagctatcacactgagcctgcagtgtgagtgcagctggccctgggaaagaggggtgtggggccctgactcctgggtatgaggaaggaggggactgtggcccttggggaatgaggaaactggagcctggactcctggatctaagatagcaggagagggctgggtatggtagctcacgcctgtactcacagaactttgggaggtcgaggcaggcggatcatctaagatcaggagttcgagaccagtctggctaacatgtcgaaaccccgtctctactaaaaatacaaaaatttgccgggcgtggtagcacacacttgtaattccagctacctgggaggctgaggcaggagaatcacttgtacccgggaggcagatgttgcggtgagccgagatcatgccactcagcagcagagtgagactccgagcaggagaggacagacagctggggtccctggggaaagagaaagctgggccttgactctcacatcggggagactaggagagggcagaaggctggcacattgaggtaactggggaaattgggaactgaaagcccagactcctggctcaaagggagaaggggattaggggcccagactcctgggatggaggaaccagggactggacacctaggccagtgacggaggtgttcctggtccttgcccatctgaccattgtcccaccctcacagaccccccagaggtgactctgtctgcttcgccacacactgtgcaggagggagagaaggtcattttcctgtgccaggccacagcccagcctcctgtcacaggctacaggtgaggacgaagacccacctctccccagccccaagagtgagcttgggaagggctgggacctgagtaggtgtgccagagaggccaggacaacgttaacagcgccaccatttcctcaggtgggcaaaagggggctctccggtgctcggggcccgcgggccaaggttagaggtcgtggcagacgcctcgttcctgactgagcccgtgtcctgcgaggtcagcaacgccgtgggtagcgccaaccgcagtactgcgctggatgtgctgtgtgagctggggccggcctgtgggtgtggtcaaaggtggccgtggctttcagggctgttgagggtcggggcctggaggggcggggccgggagagcgagcgtggggtattaggaggaggagagtgtggagctggggcatattcttgcgccctagagggtgtggtgtttctgtggggctggctgatcccaggtcagtggctgcattccgccccggccatgtgacccctagtctctttcgtccagttgggccgattctgcaggcaaagccggagcccgtgtccgtggacgtgggggaagacgcttccttcagctgcgcctggcgcgggaacccgcttccacgggtaacctggacccgccgcggtggcgcgcaggtacagccctaaatctgaggcggtggctggagggggaccaggcttccttacaaatccggcttctgacgccccttccctgtcgcaggtgctgggctctggagccacactgcgtcttccgtcggtggggcccgaggacgcaggcgactatgtgtgcagagctgaggctgggctatcgggcctgcggggcggcgccgcggaggctcggctgactgtgaacggtgagaaggcggggcttcctaggggacctggcccgtcctgggatagggagcggacagagggggcaagggctaatgcagtgggagtggcctggaaggagctttacacccagcgggggctggagaccggacctattgaaggcgaggcttttaggagaatcggagtttggaggcggcgtggcctgattgattgaggttagcggagagtgcgctggacagacccggctttgttacagcctttggggagggcaagacctctcctctgagtgacctacagtctccatcccagctcccccagtagtgaccgccctgcactctgcgcctgccttcctgaggggccctgctcgcctccagtgtctggttttcgcctctcccgccccagatgccgtggtaaggaaatgtcactcctcccgtgacccatccagccgtgatccctgacctcccacctggccccccgaaactactgtgaccatttctgacttcccagacatccctcctgcttcttcctcccctcctcagtctcctccgtgtcctccctcttttgtgcccccaggtctggtcttgggatgagggcttcctggaggcggggtcgcagggccggttcctggtggagacattccctgccccagagagccgcgggggactgggtccgggcctgatctctgtgctacacatttcggggacccaggagtctgactttagcaggagctttaactgcagtgcccggaaccggctgggcgagggaggtgcccaggccagcctgggccgtagaggtgagaccccagcccgaagaccccaaatctggagagtctaaaccccacaaacgcagggatcccccagccgagggctgcaaaacctcataccctcaaatgcagaggagacctccaaacctcgggagtctcaaaactgtgggctcattgattcccaagacacccctcaaccacaaatgccttcacattctgaatcctaaactgagagactcctcacacctaggggccccaaaaagggaaactccaatgattgcaaagcaaattgcaaagtaaaggacccctcaaattctaagactccctaaagccagggagtttaaactcactctcaaacttggggaaccccaaattcaagggcctttgaatcttcaaatgtgcgaccttttgaacccaggaatcccaaactcaatccctgagcccccgcttcctggttccccctcagccttctcaggatgtcccctctgctccctgcagacttgctgcccactgtgcggatagtggccggagtggccgctgccaccacaactctccttatggtcatcactggggtggccctctgctgctggcgccacagcaagggttagtgcctgagccccgccccggctcccgaggccccagccccacacgcgccctgcctgcccagtgacctgacctggccttgggccttggctccagtcccatttccagctctgcacagggcttagctctccttcacgttctggttccctccttaagccctaactaggccttcccagggtcacactcctcggtgggaatgattcttattggtttccaacagccctacccaatcagcctcattggttcccagtcctctctcttcccgcttattggtctgcacacattgtgaccccgcccatcgcttaactccaccggtcgctgtttgtcagcctcagcctctttctccgagcaaaagaacctgatgcgaatccctggcagcagcgacggctccagttcacgaggtcctgaagaagaggagacaggcagccgcgaggaccgggtaggatgccagggtccccagacctgactgtgcctccagacctaaataatagcccagtcccaagagggtccccaaattcaaataggactctaaggccaggcatggtgcctgacgttggtaataccactttgggaggtggagacacaaggatcacttaaggccaggaattcaaagccagcctggacagcatagcaggaccccatctctacaaaaatacaaactaaaataaaataaaaaatgaaccgggtatggtggcatacacctatagtcccagctactcaggacactgaggtgggaggatcccttgagcacaggaggtaaaggctgcagtgagctatgattgcaccatgcactccagcctgggctacagagcaagaccctgtctccattttttttttttttttttatgtaggagggctctagtctttttttttttggcagaatttcactctgtcacccaggctggagtacagtgctgcgatctcggctcactgcaacctctgcctccctggttcaagtgattctcttgcctcagcctcctgagtagctgcgattacaggcgcccaccaccacgcctgactgattttgtatttttagtagagattgggtttcaccatgttggccaggctggtctcaaactcctgacctcaggtgatccacccgcctcgacctcccaaagtgctaggattacaggcatgagcctccacgcccggcctgagggctcaagtctttttttttctttctttcttttttttgagacggagtcttggtctgtagcccaggctggagtgcagtggcgcgaactcgactcactgcaagctccacctcccgggttcacaccattctcctgcctcagcctccagagtagctgggactacaggcacccgccaccatgtccagctaatttttttgtatttttagtagagacgaggtgtataccg[140 bp omitted]caagtccatgcccctgacccaattattccctaggcccagtatgtccccacagcccgtttttgttgttgttgttgttgttgttgttgtttttgagatagagtcttgctctgtcgtccaagctggaatgcagtggtgcaatccagactcactgcaccctccacctcccagttcaagtgattctcgttccttagcctcctgagtagctgaaattacaggtgcctgccaccatgcctgcctattttttgcatttttagtagagacagagtttcggcatgttagccaggctggtctcaaacttctggcctcaagtgatactcctgctgcggcctcccaaagtgctgggattacatgcatgagccactgtgctggcttcttacagcccttttattgtcctgagtgcagtccccagctcttgggtgctcttactccctcctgcctggcctccactggctggctgaaggtccttggggtctggcattggggcggggggatcctctgactattccctctcactaagttccctaccccagggccccattgtgcacactgaccacagtgatctggttctggaggaggaagggactctggagaccaaggtgagtgttgagaggggtggggctcccttcactgttgggagaggcggggctcccttcattgtgtttccgtctctctcccacgcctgtcccctcctttttccttctgttgtcctcagagttgggactcagctccccaccccactcctcctgccccctgggccatctcactcagctcccagcctcagtttgcctgtctgcagactcttcccacacatctgtcccagccctagcctccatctggagccccagaccagggctcaccctgcctgtgctctcctcatcacggtcaagccccctttcagccaccaggtcctacactggccccacatctccccagactggttcttcctctggggtcctacctcaggacagccacattgactccaggccatccccaggccagagcacttctctctctctctctctcctgcgtacctagcacatgccattctctctcttcttttttttttttttttttttgagacggagtctcattctgttgcccaggctggagtgcagtggtgcaatctcagctcactgcaacctctgcctcctgggttcaagccattctcctgcctcaggctccctaatagctggctaatttttcttgtatttttagtagagatggagtttcacca[138 bp omitted]ttcccatgtctacctaattccttcctttagtcctccagtctcagctcagacatttcttgttctaggaagcccatgcttccgtcatgacagctcgatcattttgcctgtgttccacccatcacagccatgaccactctgatctgggcttccttatcccacccactatgctgagggctctaccatcacagcccctgtcattgcctatgcctttcccaggcacagccctgacccctctgggtactgtctcatgatctgtcatttttcctttggtgtgggattctgtgaggacagggtccagttctatcctagtgacatgccttgtagcagcaacacagggtgtgacactgaatcaaagcctagaggctgttgggcaggtgagtgtctctctcctgttccctctgcaccttccacaccgacacccctcagcaggcctatatccctccgtctctacctttctctgcctatgtcctatccatttgcctcttatcactgttcctctgtctcactttctctctctcccagtccatgtgtgtctctgtgtctctgcccactcctgtctctttttgtctctctcaaggtctggtctatttcagtgtgtctctccatcagtgaccctcatcccccctgcacgctcacagactttactgagtcccatttgtcccctcaggacccaaccaacggttactacaaggtccgaggagtcagtgtgagcctgagccttggcgaagcccctggaggaggtctcttcctgccaccaccctccccccttgggcccccagggacccctaccttctatgacttcaacccacacctgggcatggtccccccctgcagactttacagagccagggcaggctatctcaccacaccccaccctcgagctttcaccagctacatcaaacccacatcctttgggcccccagatctggcccccgggactccccccttcccatatgctgccttccccacacctagccacccgcgtctccagactcacgtgtgacatctttccaatggaagagtcctgggatctccaacttgccataatggattgttctgatttctgaggagccaggacaagttggcgaccttactcctccaaaactgaacacaaggggagggaaagatcattacatttgtcaggagcatttgtatacagtcagctcagccaaaggagatgccccaagtgggagcaacatggccacccaatatgcccacctattccccggtgtaaaagagattcaagatggcaggtaggccctttgaggagagatggggacagggcagtgggtgttgggagtttggggccgggatggaagttgtttctagccactgaaagaagatatttcaagatgaccatctgcattgagaggaaaggtagcataggatagatgaagatgaagagcataccaggccccaccctggctctccctgaggggaactttgctcggccaatggaaatgcagccaagatggccatatactccctaggaacccaagatggccaccatcttgattttactttccttaaagactcagaaagacttggacccaaggagtggggatacagtgagaattaccactgttggggcaaaatattgggataaaaatatttatgtttaataataaaaaaaagtcaaagaggcaagtgtgtcttagggagtctactggcattatcactctccaccaaggaaggggtcccttagacctgtcccaaggtccctcctctaccctagcctatgaggtggctgtaggagtaaaactgtgagccacctctcagcctcttgctacctgcaaagcactctaggctctttttttttttttcttgagacaagatctggctctatggcccacattggagtgcagtggcatgatctcagcccactgctacctctgcatcctgggctcaagccatccttccacctcagcctcccaagtagctgggactacaggtgcatgccaccacacccagctaatttttgtatttgtttgtagacagggtttcaccatgttggccaggctggtctcaaactcctgacctcaagtgatccgcccacctaggcctcccaatgtgctgggattacaggcatgagccactgtgcccagccatgggctcttttaatatacatcttcacacacacacacacacacacacacacgcacacacacacatgagttgcaaacagaaaagacacacacataggcatgtatgcacagacacacgcatagatgtccacacagttgcacacaagtgacagggctgccccaggggtcctggggaagactgaattctaactctcattagaggagacaaacaagtgagccctgaagtggagcagggaaggggagactatgggtaggaaaatggcaatcccctggtccttacagcaagcgtggagatccagaccctaatcctgaggtgctgcatccacagtgggcatggtgctggtgcctgcttggatgatccttaaagaaaggtcctgggggctttggttcatggatccttgagctaggagttaaaggtccaggcccctgggacccttgggaagcagagcaagaagagtgaactcctgggtctgaaggagaatgggctgggggcttggtctctggtcctgagagagaaggtgcccagacttctggatctgaaagaggaagggactaggtctcaactgctgccttcttgactggggacattttggaggcctgtattcctgagccctcaacagaggaatgtactaggggatgggggtctctgatgcttgcatccttggaaaaggacaaaactgtgagtgtctgggtctaaagagggtgagagtcctgcgggaggactcaaaatccacaacgggcggagcccatagccggactcctggctgggcccttcatggggcgggacgcctggaatctcgaggggcgggggcctggcgcaggctcccgcccggggttcccgagctgctccactctgcgcgaagccgccacgctattgtcctgaccaggaaggcggggccggcgcggggcggggctggcggcgccggcgcagcccgggggcggcgggaggaggaggtggcggcggtggcgctgggagctcctgtcaccgctggggccgggccgggcgggagtgcaggggacgtgagggcgcaagggccgggacatggggcccgccagccccgctgctcgcggtctaagtcgccgcccgggccagccgccgctgccgctgctgctgccactattgctgctgcttctgcgcgcgcagcccgccatcgggagcctggccggtgggagccccggcgcggccgaggtgaggccgggccgggtcctgggggatgggggaaggggcgggaccgggtctctggacgccggcgcggacatgtccagggcagaaagcgcggtctttccagccaggtggtcagcccccaggcgcccccaatcacatttatgaacccagggttccaggccccagctcccccatcatgcgacgtcccagccccctcccatctcgagcataggaactggtctattcagagcccctggtcccagaagtccagccccctctccagacccaggtgactcggccccaaccccctcccgcctggacataggacccaccaagcagcgaggcatttagatccaataatccagaccccttgtattctctggacccatatggaggcccttgcagcctcccaggacccaggagtccagtccttcagtcaccacccaccccaaccagatgtagctctccagtcctcaaggacctggtgtccaggactgtaggcccctgaagccaggccttgtcagctttgcatcctgcaacgggagcctgagcaagggatggagggaggaggggccagaactcctgggttctggcctcctcctccgcgattcaggtttaaccccttcgggctccagagcggctgcgctggggtgggggcggagtctgtctccgcggcaacaaggcagaaagaatcccgggggacccaggtcgccatagcaacgggagcgctggggcgcccccgccctacgggagctgtttcccagggaacggtgcctccatggaggcggtgtgcggtgcttgggggagggggctggtgctgggggtctcggtcctagggagcaaagaaccaggggaccctcatgccaacgccccccgagccctcactgtcctttccacttccatccaggccccggggtcggcccaggtggctggactatgcgggcgcctaacccttcaccgggacctgcgcaccggccgctgggaaccagacccacagcgctctcgacgctgtctccgggacccgcagcgcgtgctggagtactgcagacaggtgggcggggccgaacgggagaggcggggccgcccatagaaagctagacttgaaaaaggcgtggtccagggtgctgcgcgatctaaggcgtggaggctggggggcgtggccaataaagaggcgcaactatgctaggggcaggggacctgttttgagatactaagtcaggaaaaggggagagccgcgagatagccagagaggaagtggaatttaggaatctggtggtctttgtaaagagtagaggtgtaggggggagtggcgaaaggataggcggggctaagacagaaagagaccttaaggaccagcaagatggggaaaggggtggagcccaatgagagcgcggagagctgggggggcgtggccatgaaaagacaaatttataacgggaagggagagttttggagaggcggaatagaggaaaaggcggggcctaaaggagggtgagacctttggggagacgaatctgactgcggggaggggtgaccagagaggtgggcttagagggaccttcagaaagaaacagcacaggaaaagagatagggcttaaagatgacgggacttttaagggaaaactgctagtgggcgtggccaatgagcacaaggagcttggatatctaaggctggtgctagggagaagcagggcctagggaagcgatgtcctcatgaatactagagccttgaaaacggacctggccgggcgcggtggctcacgcctgtaatcgcagcacttggggaggccgaggcaggcggatcacctgaggtcagaagttcgagaccagcctggccaacacggcgaaactccgtctctactaaaaatacaaaaattagcctggcatggtggtgcgtgcctgtaatcccagctactcaggaggctgagacaggagaatcgcttgaacctgggaggaggaggttgcagtgagccgagattgtaccattccactccagcctgggcgacaagagcaaatctccgtctcaaagaaagaaagaaagagggagaaagaaagagaaaagggacctgactactggagaggggtggctggcaggggcggggcagtgggctgattgcccccatctgatccccccagatgtacccggagctgcagattgcacgtgtggagcaggctacgcaggccatccccatggagcgctggtgcgggggttcccggagcggcagctgcgcccacccccaccaccaggttgtgcccttccgctgcctgcgtgagtcccaggcggggagaggggaactgaggtgggagtttctgaggggcaaggttctgagcccctctctcaggcctacattaaggggctgggtgcttgtgtcctaagtggggcagagaagcctctgaggataaaatatctggattctgaggagggtggggttggtggctataggaggatctcaccctggtgtcccgtgcttccccagctggtgaatttgtgagtgaggccctgctggtgcctgaaggctgccggttcttgcaccaggagcgcatggaccaatgtgagagttcaacccggaggcatcaggaggcacaggaggtcaggacgttggcccacccgtccccagcccccacaacccaggaactgggacctctaacaccctccgccaccagaaccgaggagtctgggccaccagcatcctcttcgcacttgggatctaagaatttcatcccccaaccccttcctctagaagcaggaatccaggctcccagcctcatcaacccccaaccctggcagcccagttccccatctaccccctcccatcccacaatcctggcatctgggcccactcttcctacaggcctgcagctcccagggcctcatcctgcacggctcgggcatgctcttaccctgtggctcggatcggttccgtggtgtggagtatgtgtgctgtccccctccagggacccccgacccatctgggacagcagttgggtgagtgggagggaaccctccatgcccatctcaaggttcctgaggcaggggatggaagcctgggagcccaggcctgggttcttactgcctgggtcctctcctgctccctcagtgacccctccacccggtcctggcccccggggagcagagtagagggggctgaggacgaggaagaggaggaatccttcccacagccagtagatgattacttcgtggagcctccgcaggctgaagaggaagaggaaacggtcccacccccaagctcccatacacttgcagtggtcggcaaaggtgaggcagtctctgaacccctggggcctctccaccatagagggagaaagatctgggggagtcttgctggggggtgtctttgggaggggcctataggggaaaggcccaactgaggagaaaagacgagagtatctttggataaaatagaagtagaagggctaacctgccaagggagggggtggtttgggggtacttgggagtagaggggccattgggtaggtcttgaggatcatttcaggaaagcttggaagatggtgtaatggattcctaagctttgcaagaacaggcccagtccagaactacatctcccataatgccaggcagcagcggtggctaaactgggtgcatgatggtctccagtgcactctaggaaatgtggttctctaggtagaaaaggcgacctggaggtgggctgcagactgacctcctgatccctggtcttgcagtcactcccaccccgaggcccacagacggtgtggatatttactttggcatgcctggggaaatcagtgagcacgaggggttcctgagggccaagatggacctggaggagcgtaggatgcgccagattaatgaggtgataatactgggggccccaggaccccctacagtacagagctccctaaataccaggaaattcctccaggacacattgatactacctccaaaggctccctaagcccctttgaccttgagctctcaacaccaccccctaagatggccagagatccatggcccttctagaatcccactgagacgctaccaggttctctggaaactctggtctatggtactctttcactttattggtttttttttttttcttttgttgttgttgttgtgacggagtttcgctcttaacacccaggctggagtgcaatggtgcgatctcggcccactgcaacctctgcctcccgggctccagcgattccccttcctcagtctcctgagtagctgggattacaggcacccaccaccacgcccggctaatttttgtatttttagtagagacagggtttcaccatgttggccaggatggtcttgaactcccggcgggaggagatccacccgcctcggcctcccaaagtgctgggattacaggcatgagccaccacgcctggcctctctttcactttaaactccttctggatcttccctcttgggaacccaggagccagcgagacttaagggatctggggcctttaaatctttttttttttttttttttgagacagagtttcgctctgttgcccaggctagagtgcagtgacgtgatctcccactcactgcaagctccacctcctgggttcacgccattctcctgcctcagcctcccgagtagctgggactactggtacccaccacagcgcccagataattttttctgttttcagtagagacagggtttcaccatgttagccaggatggcctcaatctcctgaccttgtgatccacccacctcggcctcccaaagtgctgggattacaggcatgagccactgcgcccagccatggggcttctaaaatcttaaagaggggttgggggacttgccaggtggatcagggtggattctgggatcctgaagctcccctccctatgcaggtgatgcgtgaatgggccatggcagacaaccagtccaagaacctgcctaaagccgacagacaggccctgaatgaggtaggacagccccagtgggtcctactcatgcctgtccaccacctggagcacactcagtttcacctggctctggctgtgccctgcccatccagttccaccccttcccacctatctcagcctttcctggccccatgcctacatgcagctctgcccctcttagccgtcatctgacctgacactgctctcctccccagattggccatattcggccccatctacagacttgacttgcctctcagggctggctctggagtcctgtcccaagccagggcctctgcagatgcagccagggccttcttggtctctctttgatgcatttatgtctctatcaggccccgccccctgattctggctctgctgggccaatctcacctttattaacctgacctaccccatggagaccccactcatgttagcccccattccagctctttgtcccacccctatcgtgtcatttatacacagcctgtctccagtttgaccctgcccaggccaggagccctgcaaggctttgtccctttcaccttaacattggtcagttctgctcccagattgctcccactcaatcttacagtttacatcctcacattggctcccagtgggcctagtcccacctccactctgcctggccctgtagcccaccccttccagtccataacctttggttctgcccaggcctggacccctggaacgccccccaaccccatgtagccctgcctttccaggctctctttgaccaggctttgacccatcttctcctctcctgaccctgtgcccacccgctccccagcacttccagtccattctgcagactctggaggagcaggtgtctggtgagcgacagcgcctggtggaaacccacgccacccgcgtcatcgcccttatcaacgaccagcgccgggctgccttggagggcttcctggcagccctgcaggcagatccgcctcaggtgcggggaccgtgggggcagagagcagagggtgagaagggtcagggcgggcttgggcatcctgtgtcccttccacaggcggagcgtgtcctgttggccctgcggcgctacctgcgtgcggagcagaaggaacagaggcacacgctgcgccactaccagcatgtggccgccgtggatcccgagaaggcacagcagatgcgcttccaggtgctcacatccttccagctcccaaatgcgccgctattcctcagacgcccgcgcctcaggctcttctcttgtcccttagaccctctttctgtctcttggaccccttcctatcccctgaacaccgcttctctgccccttcccagtctctcagctcagcttcctgaccctgaaacatggaccctcacatgctgtgtctttgacccctgcttcttggcccttggattcctactccccccgccgtcgatcctatgttctgtcccttggattttcactgcctttcccagaatcgtcttttttttttttttttttttgagacaggttcttgctctgtcgcccaggcaggagagcagtgtgcgatcttggctcattgcaacttccacctcctgggttcaagcaattctcctgcctcagcctctcgagtagctgggattacaggagcctgccaccacactgggctaatttttttttttttttttgacagagtctcgctctgtttcccaggctggagtgcagtgacatgatctgggctcactgcaacctccgcctactgggttcaagctattctcctgcctcagcctcctgagtagctgggactacaggcgggtgtcaccacatctggctgatttttgtatttttagtagagacagggtttcaccatactggtcaggctggtcttgaactcgacctcaggtgatccacccttggcctcctaaagtactcggattacaggtgtgagccaccacgcccggccccagctaatttttgtatttttggtagacacgggtttcagcatg[137 bp omitted]cagagacagggttttgccatg[137 bp omitted]gagacagggttttgccatgttgcccaggctagtctcaaactcctgacctcaggtgatctgcctacctcggcctcccaaagtgctgggattacaggcatgagccaccgcgcccggtcgagaatctccttcttgttccttgaaccctcttcctgtccctcaacctcctttctccataacttcacttgttttccctggaacccctgttctgtgcgctcaaatttgaattcccctttcctggatgttttcttcctgtctatgaaactccattctgtgctcttgaactccaaatcttgccttgaaccatgtcatttctatatgaccctccaatcctcaatctctgtctctggaatcccctcaaaccccactttctgttccttggactttattcttcaatttccttctcctatggcccagttcctaacccttgtaccacacatcctgtccattgcatgtgccgcttttcctcagtcgctattgaattcctccttcatactgcttcagtttcctcatctccagcctgcattgcgcagttcatccttcatgtccactcacccacaggtgcatacccaccttcaagtgattgaggagagggtgaatcagagcctgggcctgcttgaccagaacccccacctggctcaggagctgcggccccaaatccgtgagtgtctattaccctggctcccattacagatctctgagggcagatcttgactcctaaatgttgggcccccccaatttcatttattcctctataacaaacagcccagaccttagcagtgaaaatcaacaatgatttttctttgttcatgattctgccatccggtctgcgctcagcagagtggttctttcagtggtcttgccagtggtcaagcatgcagctgtatttagctagcagatcatctaggggctgggagtctagcacaaatggacctttctctctctccaaggaagcgcaaggcctctcttctccgtggagcttctccatgtggtctcatcagcagggtagctagattccctacatggtggtttatgctctctaagacatcacagtggaagttgctaggtcttaaggcttgggcccacattctatttgttaaagcaagttacaaattcagtccagattcaagggaaggaacctatatgcataccggaaagtgtgacctattgcagcccccacatctattgtgtctttctcctggatatctcacacataaccctgattctcctagtatttaagaaagctatcatcttgaggcgcggtggctcacgcctataatcccagcactttaggaggccgaggcgggtggatcacttgaggtcaggagttcgagaccagcctggccaacatggtgaaaccccgtctttactaaaaatacaaaaatcagccgggcatgatgtcgcttgcctgtaatcccagctacttaggaggctgaggcaagagaattgcttgaacccgggaggtggaggttgcagtgagctgagatcgcatcattgcactccagctgggcaacaagagtgagactctgtctcaaaaaaaaaaaaacaaaaaaaaaacataatcttgaaacttcagcctccatccttcctgccagcagtgcctccatccagcttcccactttctcagatcacacttctggctaccccacacttggggctgactctgctgtctgcatgatctcccacttgctctactggtagggtgccctccactcacccctatgctcactacctcagccacctttctgcatgtccccctcagaggaactcctccactctgaacacctgggtcccagtgaattggaagcccctgcccctgggggcagcagcgaggacaagggtgggctgcagcctccagattccaaggatggtgagtgagcccacatatagatgaccccagacattagggaacaggccccagcctaatttgtaatcccctagagtctgagggtgtcttcaccaccacagtgactgggagaggatgaggaggaacgtctaaggttgcaggggcctctgtaggatccccaatcctccttcttagtccctggaaggatgtttctccacctttctttgctgataccctcctctcttcactgttccactcccttgcttcctctggctgccagcagacacccccatgacccttccaaaaggtgagtgtctcacagttaaccccagcctccaaatcccactgaatccctgaacccagaaggaaacagggtccatccattgggaacctcagaccccctggggtagagtttgatgtactttccagccccctcctctggaccctaaagaatgagatagggccaggcgctggtgactcacacccgtaatcctagcactttcagaggctgaggcaggaggatcccttgaggccacgagttctagaccagcctgggcaacataatgagaccctgtacctacaaataatttaaaaattacctgggtgtggtggggcatgtctgtagtcccagctgctcaggaggctgacgtagaaggatcactggagcccaggaagttgaggctgcagtgagctgagatcatgccactgcactccagcctgggtgacagagtgagactctgtctaaagaaaaaaaaaaagaatgagatcagacttgggggtagggtccacagaacaagatgctgcatcccctgagaaagagaagatgaacccgctggaacagtatgagcgaaaggtaagttagtcagaactgtgggctccctaaggggaacaagatcggggcctatatggctgggtacgagggaggagatgctgggggcttggattccttgtcctgagggaagagggagctgaggacgtggaattgagatcctagaaaatgagagggctgggggacgctctcttgggcccttgggtaggaagaagccagtgccaggcttctgggttcctgacacctcctgctcccccaggtgaatgcgtctgttccaaggggtttccctttccactcatcggagattcagagggatgagctggtaagaggaggaacagccgggtacctaggggaagagaccagaggtcagcggccaggctgtgattcccaaagccacacaggaccctcaaagaagccctctgccccatctcctctccctgcaggcaccagctgggacaggggtgtcccgtgaggctgtgtcgggtctgctgatcatgggagcgggcggaggctccctcatcgtcctctccatgctgctcctgcgcaggaagaagccctacggggctatcagccatggcgtggtggaggtgagaaccatggcgtggtggaggtgtgggaagagttcctgagcccgggtgtgggcggcctgagagacttgcgggcagtcccgcccccgcaccacactgtcctttccctcccctgctcgttgcaggtggaccccatgctgaccctggaggagcagcagctccgcgaactgcagcggcacggctatgagaaccccacttaccgcttcctggaggaacgaccctgacccggcccccttcaccccttcagccgagcccagacctcccctcttcctggagccccagaaccccaactcccagcctagggcagcagggagtcttgaagtgatcatttcacacccttttgtgagacggctggaaattcttatttcccctttccaattccaaaattccatccctaagaattcccagatagtcccagcagcctccccacgtggcacctcctcaccttaatttattttttaagtttatttatggctctttaaggtgaccgccaccttggtcctagtgtctattccctggaattcaccctctcatgtttccctactaacatcccaataaagtcctcttccctaccaggccagtctgagtctctgtgggagaattagtctgtaaccacagctggacgcggtgtcatcgccgcccaggccgccttggcctctttaaacgggatgacggagctttaaatctgggcgggtcctgcgggaagggctggcgcgccgggggcggggctcagaggccagggataggcgcctgtcctggagctgtccgcggtgctgaactggccgcgccttccaactgtcagttgggtaccagtgtggaccccaaggaggctgggctccagcgagtttcccctgccatctgttcagcctcacacacaatcacatgcagcgcccaccccaatcttcgagagtcctgtaagagattatgaatcgtgaaccaccgttcccattccccaaagtcttcattccttctcggggagtctatagaaaccctcctggagtgtggaaattccagtcacgtgtcccagaaagggatatatgatatctgcacgtgcctactgaacttcgttttattttctccccctactgcccgtataaatgcagaagaatttctttttctttcttttctttccccacctccctttttttaagacagggtctaacactgtcacttaggctggagtgcagtggtgcaatcatagcttactgcagcttccaactcttgggcttaagtgaccctcctgcctcagcctcccgagtagctggaactataggcacgtaccgccacccccggataatttttttaaaaaaattttaggccaggtgcggtggctcacgcctgtaatctcagcactttgggaggctgaggcgggcggatcacctgaggtcaggagttcgagaccagcctggccaacatgatgaaaccctatctctactaaaaatacaaaattagccgggcctggtggcgtatgcctgtaatcccagctacttgggggctgaggcagaagaatcgcttgaacccaggaggcggaggttgcagtgagccaagattgcgccactgcactccagcctgagcaacaagagcgaaactccatctcaaaaaaaaaaaaatttagagatggggtcttgctatgttgcccaggctgctctccaagtcctggcctcaagtgatcctcccacctcagcctcctgagtagctgggattacaggcgtgcagcactgtgcccagtattggaatttataccctcacatgtcccattatgctggctcgggttagccctctacatatacagttatctgtcccaagagggttaggaggatttaaagggttaatattcgtggagctgttataactgcacctgccacttagcaagtatttgttaaataaattttaaagtattaaggtagcaaacactcatatggtgttcaccctgtgccaggcactactctgagggctttacatgcactggcacacttaaccattactcctgtgaaaggaaaataaatcctgggggccccaaatcactaagttaaagggaaaagtcaagctgggaactgcttagggcaaacctgcctccctttctattcaaggtcatccctgtactcactgagagaggcatattctgattgcctcctttggaaaagctaaccagaaactcaaaaggatgcaaccatttgtctctcacctacctgtgacctggaagccccctccctgctttgtgttgtcctgcctttccagacagaaccaatgtacatcttaacatatgttgattgatgtctcatatctccctgaaatgtataaaaccaagttgtaccccgaacaccttgggcacatgtcgtcaggaccttctaaggctgtgtcatgggtgcatatcctcaaccttggcaaaataaactttctgaattaattgagacctgactcagatattcggagttcacatttccatctaatggagtcagtattatgactattcctatctatagattaggaactgaggctgagagtcgttacatcacatgctctatgtcatcatccaggaaaagtcagagctaagaattcaatccaagaagcctggctccagcatccactctcctggccactttgctaacctgtttaatactccaaggttgtccaatatggtgctccgattgtgcgcttcaaaattccacgtggctgggcacagtggcacgctgctctagtcccagctacccgggaggctgaggcaagaggattgcttgagcccagggcttctggactggagtgcactgtgccacttgggtgtccacactaagtttggcatcaatatgatgacctcctgggaatgggaaccgacctaggaaacataggtcaacactctcatgctgatcagtagtgggatagcacctgtgaatagccactgcgcttcagcctgggcaacatagagggaccctgtctaaaaataaaaataaaaataaaaaataaataaataaataaataaataaataaataaataaaatccaagtgataccattcacctcccagactttgtagatttgcttttttaccacagcttcccaggagatggcagtaaagtgtcatgttctaatgtcagtatcttgcatgattttctgacagatggtttggggagggagcatctatttctaattctcccaaagggcctatgagctagctgtggttcttcataatatataactgtaaatataggtcgtgtatattgaatatacacctggtagatgttaggagaagacgcttcatggtgcaagttggatgcaatgccagtctctgtagagaactcagtttgcaccatcactctgataccggttatatctttggttatactcggatgagcccagtggaaatctatcactaacgccacaggcaccacaggggttgaaagccgcctttgtattttcacaaccaagagtgatcaacaggctaacaacaggtaaggagctccaagcaggtgaaacaggaaaagtaaggcggttttgctcaatagggtcagtgtgtaaagtaaagtttaatggtaatacttagagtatttaattttaaaatgttgttattcaaattccagcaggaaaaataattttgctgttatttatctgatgttcttgcactcctaagtcattcttttcccactgaagatgatcttggtaatactgtttttttgttttgttttgttttggttttgggtttttgagacagagtcttgtcaggctggagtgcagtggtgtgatcttggctcatagcaacctccacttcccaggttcaaatggttctcccacctcagcctcccgagtaactgggattacaggcgcccgccaccatgcctggctaatttttgtatttttaatagagacggggtttcaccatgttggccaggctggtcttaaactcctgacctcaaatgatccacctgccttggccttccaaagtgttgggattacaggcgtgagccaccgggtccggccaatttttcttataataattcagtttctaccatgtgcgtggctcatgcctgtaatcccagcaatttgtgagactgaggtggaaggatcgcttgagtctaggagctcaagaccagtctgggcaacatagtgagacacagtctttacaaaaaaaaaattagtcaggcatggtgatgagtgcctgtagttccagctactcgggaggctgaagtgggagaattgtttgagcctaagaggtcgaggctgtagagagccaaagaagacagattgagacccggtctcaaaataataataataataataatatatggacaggtgcagaagctcatgcatgtaatcccagcactttgggaggccgaggtgggagtatcccttgagcccaggagttcgagaccagcctgggcaacatagtgagaccctgtatctacaaaaatagaaacgaaaaaattagctgggtgtggtggcatacacctgtggtcctagcttctcaagaggctgaggcagaaggatctcttgagtccaggcaggaggtggaggctgcagtgagctgacattgcaccactgtactccagcctgagcaagagtgagaccctgttcttatttaaaaaaaaaaaaaaaaaaaaacacacaaagtttctgagggacattttatcatgttagtggggtgggtgtgtgcacatgtgtgtattgatatgcatcttagtctgggctaagaataccatgagctgggtggcttaaacaacacacatttatttctcacaagtgctagaggctgagaagtccaagatcaaggtgccagcagctccaaagtctggaggactctcttcctggtttgcagatggtttgttttgttttgttttttgacaaggtcttgttctgtcacctggctggagtgcactggtgcaatcacagctcactgcagccttgatctcccaggctgaggcaattctcctgccttactctctcgagtagctgggaccacaggtgtgcaccactacacctggctattttgttttttttgagtagagacaggatttcaccatgctgcccacgctgttctcaaactcctgagctcaagctatcctcccatcctggcctcccaaaatgctgggattacaggtgtgagccagtgtgccctgcccaagatggccatcctcttactgcatcttcatatggcagagagtagagagcagagaagcaagctctctcctgtctccttcttttttttttttttttgagatggagtttcactcttgttgcccaggatggagtgcaatggcatgatctcgggtcaccgcaatctccacctcccaggttcaagtgattctcctgcctcagcctcctgagtagctgggattacaggcatgcaccaccatgcctggctaatatgtattttttagtagagacggggtttctccatgttggtcaggctggtctcgaactccagacctcagatgatccacccgcctcggcctcccaaagtgctgggattacaggcatgagccaccacgcccggactctcccatctcttctaacaaggacattagtcccattcatgagggctccaccctcatgacctaactacctcccaaaggcccatcttcaaatactaccccactggggcttatggtttcaacaaatgaattttagagggacacaaacatgcactccataacaatacaaattgagatatacatcttatatgtcaacaaaacctcagatgccatcagtgataaaaaatagcattattttaggtaccacaaaaggaaaaaaaaggcaaaatataaactatgtcacacaattgactataagatgatcccaattaagttcttctgtattttttattttattattattatttatttacttactttagagacagtgtcttgctgcctcccacgctggagtgcagtgctgcaatcatggttcactgcggcatcaaactcctggcctcaagtgatcctcctgcctcagcctccaaagtagctgggactacaggcacccgccaccatgcccagctaatttttgtatttttagtagagacagggtttcaccatgttgaccaggctggtctccaactcctgacctcaagtaatccgccctccttggcctcccaaattgctgggattacaggagtgaggcacctcgcccagtccccagataactctgtctcccaatattgagacccttgtgtaatgcctcccacactgatctgggatcaatgacatgtcaacaagtatgatacaagcagggacttgtctccttggatctctctttcttggaaccactgagccaccacctgaagttaagagatccacctgccctcctggactgcatggaaagactcttgggccactcctggaagctccattatctcagctgagctatcaggcatgtgagtgaaggtgttgtggatttccaggccagttgggcctcaggttgattgcagccacatgaggaaccaaagggagacagcagaacagccagctgaacccggcgtagatttcagtcagaaacaattaagaggggctgggcgcggtagctcacacctgtaatcccagcactttggtaggccgaggtgggtggatcacttgaggtcaggagttcgagacaagcctggccaacatgctggaaccccaatctctactaaacaaatacaaaaattagctagacgtggtggtgggtgcctgtaatcccagctacttgggaggcagaggcaggagagtcgcttgaacctggaaggcggaggttgcagtgagcagagatcgcgccactgcactccaatctggtgagactgagactccttctcaaaaaagaaaaaagaaaagaaataattaaaagggtgttggtttaagccttaagttttggggtggagacattggctggagccccggaatgtgctaacatgtacattcggtctgtggtccatgaaaggttcctagctatgggggctgtgatgggtccaagggctttctgggatgggggctctttgtgtgattatattgcagaggccagagcagaggctgtggagcgggtatgagaatggggtttgggtttttttttttttttgagacggaattttgttttgttgcccagggtggagaaaagtggtgggattttaggttaatggaagttccgcctcctggatttaaggaattttcctgctttagcctcccaagtaggtgggaaaacaggtgcccgccaccatgcctagctaattttttttttttttggtttgtatttttagtagagatagggtttcaccgtgttagccaggatggtctcaatctcctgaccgcatgatccgcccgcctcggcctcccaaaatgctgggattacaggtgtgagtcactgcgcctggccaatttttttgtatttttagtagagacaaggtttcatcatgttggccaggctggtctcaaactcccgacctcaggtagtccacccgcctccgcctcccaaagtgcagggattataggcataagccactgcgcccagccttgggggtttttttgtatctttttttgagacagagtcttgctctgtcgcccaggttggagtgcagtggcgcaatctcagctcactgcaacctctgcctcccaggttcaagcgagtctcatgcttcagccttctgagtagctgggattacaggcgcacgccaccacgcctggctaatttttgtatttttagtagagatgggtttttgccatgttggccaggctggtctcaaactcctgacctcaggtgatctgctcgcctcggcctcacaaagtgctgcaattttaagtgtgagtcactgcgcctggctgagaatggggttttgtggaattcttagtttgggtttctccaaaagcagctatggagggaaggattggagggaaagttcatttggaagggatggagaacattggtaggggagacaggaagagacacagagaagaaagagcagccaataaagggtattttatcaagcccagaccactgtggggaactggggattcatctgctggggaactctggagcccgcataggccatgcacttccaagttagcccaacagacaggtgggggactatctcctatcagtaactggctgagggctgctggagtgggaagtggacacgaaccccctggctttcaacacttgccatgctcatacctggggcagagccgcaccagtggtttgagattgcccaaaggcaaatattctggggctgacacccaggctggtctcaaactcctggcctcaagtgatcctcacaccttggcctcctaaaggccagtccctcttgtgtcgccagggtgagggtgacaggatatggacttggcacccatggtggctgctacatcctcccccctcaggcacattcatcccaatatgacccctcagcgggcatcacagccactcccctgcaccagtgcccccagagatcagacaacagtggttctagtccaaattgagtttaaatttttttttttttttttttttgagacagagtctctctttgtcacctaggctggagtgcagtggcacaatctcggctcactgcaacctccgcctcctgggttcaatcaattcttctgcctcagcctcccaagtagctgggactacaggcgcatgccaccatgtccagccaattgtttttgtatttttagtggagacagggtttcaccatgttggccaggctggtctcaaactcctcacctcaagtgatccgcccgcctcggcctcccagagtgttaggattacaggcatgagccaccaaatctggcccaaattgagtttaataaagagcttgagtgatgctcagattagggagggagtgaccgggaatgctggggtctggaactgggggcccagctgagctctgaatcagagagcagtgagacctaagggtccctgatctcagagggtccctcctgtctcagggtgaggacctgaagggtgtgggtcccggggagggtgaggaggccattgtaggagatttactgagatggtatcgggatgccccaagcaccacgtagggggattacatctgggtttctgggaacgaagagctgagttaggggagagaacccgaaagatctcagtggggaaaggactaggggtgcagggtgtttcacagaaacaatcaaggggcctcgatttcacagaaatcatcaagagggctccttgtgggtagaagaggggtatcacagcaccccaaatattggggcctgttcacccctctgcagccattctggggttttaatgtaaaaccccaatggcaggatattccacatacattatcatgggtttgcaacattagcatacgctggctgtcccgcaggacggtggggactggaaaatcagtccagggtctgggtttgagtcctaagaggacaggcctggcggcgccacacggctcctcttcaacagctgccggagctgtagacaaggcaaaggagggagagaagtctgtcaggttggaaggagaggtggggaaggcacgccatgcagagggaggggctagagaagagaggttgagtgggtccctttggatttgaagatcagaggtccagagtcaagattttggaagagccaggtgcagtggctcacgcctgtaatcccagcactttgtggggctaaggtgggcaaatcacctgaggtcaggagttcaagaccagcccagccaacatggcgaaaccccgcctctaccagagatacaaaaattagccgggcatggtggcacgtgtgcctttagtcccagcttgggaggctgaggtgggagaatcacttgaacctgggaggtggagcttgcggtgagctaaaattgcaccactgcactccagcctgggtgacaaagcaagactccgcctccaaaaaaaaaaaaaagatttgggaaggaggccgggagtgatggttcctgtgatcccaacactttgggaggccaaggcgggaggatcaattgaggccaggagtttgagatcaacctggacaacatagtgtgaccccatctcttaaaaaaaaaaaaaaacaaaattagctgggtgtggtggtgactgcctgtagtaccagctactggagaggctgaggtgggaggatcccttgagcccaggagctcgaggctgcagtgagctatgatcatgccactgcactccagcctaggcaacagagcaagacgctgcctcaaaataaataaataaacaaacaaacaaataaaaataaagatgtgggaagaaggtcaaggcctgggttcgtacactgagaaagggtcaggaagcagaacttcagtgaagggaaaggggctgctggctgggggttcccacctgggggtgaggaatgagagggaattgaagggaacaggtaagaggtcaaaggtcacatctgaggtcaggacccaaggttaggggcagggggtaggaggtcacacttggggggatcaaaggtcacaccttgaggtcaagcaagattcagggttggaagtacaggtcacactgtgaggtcagggttggggtagagatcagagaagtcaccattctggggtaaaggatgaaacactgaggtcagaggtcacattatagagtcagggttgcctgagggctgaagtcaccttccgagattagaagtcattctctgaaagcgagcattgggtggggcagggaggtcatcccgcgcccgcgagctcagaggccactctacaggcaggctcagtgcttacttaccccctcagggcccggcccgggccgcagcaggtgaacgggctgctcattctccaggttgcgcagtgtggggtccgccccagctgccaacaggtgccgcacgatggcctcctgggccggcccagggggcagggcagccgccatgtggagggctgtgttcccgtgggcctggaaaagtaaggggagggctggtggggatctgggctcagctggcccaggcctctaaactgcacttcaatttctgccttgtctacgtcctacacttgtcctttcacatcccagacctcccccggccacagccacgctgcatgcatccctgtgtccacggactacatgttctggggcaatctgtgtctgcttcctatactttcccctgcagatcccacacatcgtcccctccacgtccacagcccccaggacccctaacatcccactgccccccctaccgtaccccacacaatctgcacttcccagccccagctcccaccttcatgttgacaaaggtccgcaggtctccccggggcagctccagcagcagctgaaccagagtggggttggcagcctgcacggccaagtgcagaactgtcttgttgctcttgatctcctgaggggaagggaatggcagaggtcagggccagcctcacacctaggtgccctcccacagaatccaggagtctttaaagaccctgacccttggcggagtgcggtggttcacgcctgtaatcctagcactttgggaagctgaagaaggaggatcacttgaggccaggagctgcagaccagcctggacaacacagcaagacctcatctctacaaaaaatagaaaaattagccaggcgtggtggtgcgcacctgtagtcccagctgcttgggaggctgaggcaggaggttcatttgagcctaggagttcacggctgcagtgggccatgaccacaccactgcactccagcatgggtgacagagtgacactctatctcaaaattaataaataaataaataagatgctggccctcttctgcgagccccaccaagagtgccttattcagttgtatgtcttgtgcaccgcacaacaccacgtctcagggtgtaccattcacaccatacaccttccagaactgtacatttctcatgacaattttcccaccagtgtctgagaaagagactccttttccagttcttcaaagcaactgccttggctacctgccctccattcaacacattaaattgcatcccgacccacacagactgtactttatctacaagcacaggagttggcagcattaatcagtggactagctaatattgcaatactgcaccacaatattgagctgttcccatcatatttgggggaaaataaaagacattttctaaaatgaaacctttttatgtgtctttaaggagtttgtaacgataatgaatgttaaacattttatgtgctgataacagggcaaaaccacctagtttgctcgtccaaaaaatgatgaagacaaaaccaaagctctagattaagagtgatttgaaaagacgtaacatcataatatgtgtgcttatttggatcttgattttttttaatgaaaaaaattatcattttacagccaaaaggaaatttgaatacagccaggatatttggtattacaagaaaatctttaattttttaaagacagagcaatgatactgaggtttaaaaagttcttttttttcgaagggcacaggggctcatgcctgtaatcccagcactttgggaggccaaggagggcggatcacttgaggtcaagagttcgagaccagcctggccaacatggtgaaaccgtctctactaaaaatacaaaaattagccaggcgtggtggcacatgcctataatcccagctacttgggaggctgagacacaggaatagcttgaacccgggaggcagaggttgcagtgagccaaaatcacaccattgcaatccagcctgggcaacagagtgagactccgtctcaaaaaaaaaaagctatgttttttgtttgttttttgagacagggtctcgctctgttgcccaggctggagtgcagtggtgtgaccaaggctcactgtagcctcaacctactgggctcgagtgatcctcccaccttagcctccccaagcactgggattacagggaaagagttcttatcttttattattgttgttgttgttgttgagagacagggtcttgctctgtcacccaggctggagtgtggtggcaaaatcatggctcactgcagccttgacctccccaggttcaggtgatcctcccacctcagcctcctgagtacctgggaccacaggcatgtgccatcaagcccagctaatttttgtattttttttagagatggggtctccctatgttgcccaggttggtctcgaattcctgagctcgagcagtccgcccacctgagcctcccaaagtgcttggattacaggcatgagccaccgcacccagccatctttcttatttttaaaaaacttattattattactaaaaatacaaaaattagtggggtgtgatagcacatgcctatagtcccagctactcgggaggctgaggcaggagaatcacttgaacctgggaggttgcagtgaaccaagactgtgccactgcactccaacctgggcgacagagcgagactccatctcaaaaaaaaaaaaaaaattatttgtccttttttcagagaaatactccctgatttctgagttctcccagaaccctaccacacagttaattcttcctcttcatcatttcttgctcaacttaaatgtaatttcctcagaatgaccttcattgtgagccccgcatccaatataaagccaatctttttattgtctaagagctccttctacattcccaaggcagctctcatcccaatttgtaattatgttcagttctttgtttacttatcatctcctctcttttccattaaattttaatgtctaaaagtacaagaaagtggtcttttcttattaaaacattataggtagctgggcacagcagctcacgcctgtaatcccagcacttgggaggccaaggctgggggatcacttgggcccaggagttcgagaccagcctgggcaacatagtgagaccccccctctctacaaaaaatataaaacaattagccgggtgaggtggctcatgcctgtagtcccagctacttaggaggctgaggtggaaggaatgtttgaggtcaggaagtcgaggctgcagtgattcgtgatcgcaccacagcactccagcctgggtgacaaagccagactctgtctctaaaaaacaaacaaacaaaaagcaactttatgccccatcactagcacactggtagctacatcatatgtgtccaaaattctgagtgaagaaacgaatgaattaccaaagtatcaatttcaccttctctgtattgcccaaatgatcacttagctctactttgcaaccattaagagcctagattaccatcattcatttcctaaccccgctaataatgccttatcttgtctctactcagtcatgcccgtccttcttacagtccatccccaccatctagctaattctgctaaacaccattattctttaaagatacacaaatatttttgaaaaaaat[136 bp omitted]cggtgaaactgcgtctctactaaaaatgcaaaaatttagccgggcgtggtggcgggtgcctatagtcccagctactcaggaggctgaggcaggagaatggtgtgaacccgggaggcggagcttacagtgagccgagatcgcaccactgcactccagcctgggtgacagagcgagagccatctcaaaaaaaaaaaaaaaatcacttgaaagtgagagagtggatggggcaggactggccatgagtggctggttattgatgttggacatatggagttcattccactattttctatattttattggtgttcaacattctttaactaaaaaaacatttttcggctgggcgcagtggcttatgcctgtaatcccagcactttgggaggccaaggcgggcggctcacctgaggtcaggagtttgagagaacagcctggccaacatagggaaaccccgtctccattaaaaatacaaaaaaattagccaagcgtggtggtgcatgcctgtagtcccagttactcaggaggctgaggcaggagcatggcttgaacccgggaggcagaggttgcagtaagccgagatcatgccactgcactccagcctgggtgacagagtgagattccatctcaataaataaataaacattttttgtggatgtttaattctctcagccagcctatgaaggagctactgtcacaggaaaggaacagaacataattaaaagctaggttctaaagtcagactacctgggttctaattctctctctgacagtcacaagctataagatttttcaggctgggtgcagtggctcacaactgtaatcccagcactttcagaggcagaggtggaaggattgcttgagctcaggagtttgagaccaacctggccaacatagttagaccccaccttacaaaaaagttgccacgcatggtggtgcatgcctgtgatcacagctacttgggaggctgaggtgggaggatcacttaagtgcacaaggtcaaggctgcaataagctgtgatcatgccactgcactccagcctgagtgacagagtgagaccctgtctcaaagagatttttgaggccaggtgcagtggctcacgcttgcaatcccagcattttgggaagccgaggcaggaagatcacctgaggtcgggagttcgagaccagcctgaccaacatggagaaaccctgtctctactaaaaatacaaaattagctggacgtggtggtgggaacctgtaatcccagttactcgggaggctgaggcaggagaatcgcttgaacccaggaggcggaggttgtggtgagccgagatcacaccattgcactccagcctgggcaacaagagcaaaactccatctcaaaaagaaaaaaaaaaagatttttgatttcccatgcctgtttccttttcagtaaaatagagaaaatagagtacacatgtcaaagggtgtttgtgaggtttcaataagctaatctatgaaactcagtgcttgatgaatgaatagtaagtgcttgataacataccctaaggtcagtaatattattcccagttaacaactaggggccaggcacagtggctcacgcctgtaatcgcagcactttgggaggccaaggtgggaggatcatttgaggtcaggagtttgagaccagcctggccaacacaatgaaagcccacttctactaaaatacaaaaaaaaaaaaaaaaaaatagccaggcatggtggcgtgcgcctatagtcccagctactcaggaggctaagacaggagaatcacttgaacctgggaggcagagtttgccatgagatgagattgcaccactgcactctagcctgggcgacagagtgagaccctgtctcaaaaacaaaaaaacaaacaaacaaaaaaaccctgctgggcgcggtggctcacgcctgtaatcacagcactttgggaggccaaggcaggtggatcacctgaggtcgggagttcgagaccagcaagaccaatgtggagaaagcctgtctctactaaaaatacaaaaaaattagccaggcgtggtgactcatgcctgtaatcccagctactcaggaggctgaggcaggagaatcacttgaacccgggatgcagaggttgcggtgagccaagatcacaccattgcactccagccagggcaacaagagcaaaactccatctcaaaacaaacaaagaaacaaacaaaaaacccctaaggcacagagaagtgaagtaacatgttcaagggcacgcagcaaggaagaggcaaagtcagcatttgcctggagctcccggacatccaagtggccccattccacacaatctcccagggtctgaccgcccacatccccgctcacctggctggtgtgattagcacccatttgcagcaacatgtggacacaatccagcctgtctcgggcctgtgtgctcagcacccggggacagaggtcggaagggcgcatagcaacgttaagggccaggatggccgtgtggagcggggtgaggcctgcagaatggagacagtgagggacccgcatctgcacccacctcgcccagccacaccaaccacaccagccctgcccacacccaacttaccctcgaagtctctggcttccaggtcaacctggaccccagagttaagcacagcctgggaggaagagaaggcagactgctgggtaagggtatcccctggcctcctggccctggaagccaaaatctgggcaaccagtctaccccccagacaaacccctgcctgccagctggccataccaagagaactcctgggagcccgtaggtagcggccacgtgcaagaccgaacgtccctgatggtcagcggcattgggctctgctcccaggttcaacagatcctccacaatcaggggctggttggcagcagccgccaccaggagaggggtctgcaggccacaggagaagtcaggttgggctcctggttccctcccgtcagaaaaccaggctcccagccccatcccccctcagccccaggagctcaccccccattcccctcttctctaggatccaggggtccaggccccaggctccttcctcccctgaacccaggagagttcaggccccaagcctcaccttgcccttatgctcacgaatgtcaagacgccggtacacctggagcacctcagccgcagcatatgccgcccagcgcagcccccgagccgcaaacaggtgaaggagcctgaggacaggtgggggacagccgtgagaacagcccccaccaagccaagagtctgcagacaaccctatcccttatactcacgtgtccccctcctcatcctgggccagcagctgctgtggccccaaagccagcatgtgagctcgggccacctccagcgatggtccagggaccacagcggggaactgtgggggtcctgaagggggtgcagaaactctccagggtccagcctgtggcagagaagatcctacatagaactgggtgtctggggggtcctggagggtgcaggtggtggggagacccagtcagctgagaattcctccatcccaagccaccacacacacatctgcatgcagagcccctgggtatcccatctatgccaagtgaccttggacctttaggcctcagttttgcccacctggaaaagggtatttttttttttcggtgacagagtcttgctctgtcacccaggctggagtgcagcagtgcaatctctactcactgcaatctctacctcctgggttcaagcaattcccctgcctcagcctcccgagtagctaggattacaggcgtgcgccactacacccagctaatttttttatttttggtttcaccatgttggccaagctggtctcaaacgcctgacctcaagtgatccgcctgcctcagcctcccaaagtgctgggattacaggtgtgagccaccacgcccggcctggaaaagggaatcgtaactgagctccagacatctcagaatactgcaggagtgcaactgcgaatttttaggggcccttcagcatcctgtacccactctgtatctcacctccatgccctggggaaatgggcacggctgccctgggtccgagggtgggtagaagtcaggaggcaggaaattttcggcagcagaagcagggcaagagtaggggctgtcagtgtaggcagcatgcgtgttggggtcccagtctggaaagcccaggctgctaggtccagaacccacagtctccgagtgtgctgggaagggagggtggcctgcgtgtaagaggaggggcaggggcaggtctggttaccagagttggggacgtcacatccagggctagagggcctggcgtctcccaaggtactgagagttagtacttctgggacaccaagctcccgggacctggattcctgggacactgaggaattgagggcctggactcctggggcactaaaaaggctgagcctgggccctggggctccgtaggactatgtgcatagactactggactcaagagaacctaggaaatcagactgctactgagttccagcaagaatgagggcctaccagcctaggcaacatagccagaccccgtttctacaaaaatttaaaaaattagccaagcaaggtggcatcgcctgtggtcccagctacttgggaggctgaggcgggaggatcacttgagcccagaaggttgaggctgcagtgagccagatagcgccactgcactccagtgccagggcaacagagtgagatcctgtctcagaaaaaaaaaaaaaagggaagaatgagggcctgactcccaggtgtcccaaagttctgagagctgcgatgtctgagtcccttagggaagggggatggggaggccgggagctgagagaacttaccagtcacagcctcattcacagatggggtcaggggctgctctgggggagggagaaattgtccctgtagagacaaaagcaaaaaggaacccaggtgactttatctggcagattcctccgggtctgtctcggatctataagacatttcggtcaggaccacccctctcatcagccccgagggcccggcaagccgctgagtccctacgggacagcacggggcctccggagagctgtggctccctggcctcacctgcaccccgccagcgtcgggctgctgctgctggcggcgcctctgctcttccagaagcttcttcacggtttgcgttgggcagtggctgcgctcacccctgctcactgtgcgggagaggagagggggaagtcatcaagggtccttaagtcacctaaatgccgcgggggtggcgcgcggggagtgggtttgggcaccctcctcgccctcccgcgcggaaaaactggcacatagatgccgcctgactcctccaaagccattagaagatttggggtggggcatccgcctccgccgtttccttccttttgctccgcactttccctctgacccaactttccaccaccgtcgcggaaagtgaggaagggggaggagggcacccctctgcagcaaccaccccacttccgtaaaaaaattccacccccagatatccaagttttgaagtcagcgggttggtggggggccggcgccaggcgtcactccctagactcacatccaggttcccaacatttttttccctagaacctgacccggaaatcaggagtccccagcgcccctcctcgagaagtcaaaggcctcaccccgggccgggagcggtggctcacgcctgtaatcccaacactttgagaggccaaggggggcggatcacctgaggtcaggtggccaacatggtgaaaccccgtctctactaaaaatataaaaattagccgggcgtggtggcaggcggctgtatatcccaggtgaggcaggggaaacacttgaacccgggaggcggaggttgaggttgcagtaagcggagatcgcgctactgcactccagcctgggcgacagagagagactccattaaaaaaaaaaaaaaaaaaaaaaaaaggcccatccatacagtctctttttcaggccccaggaatctggaccctcagttccttcctctctaggacctgggagccccagttcccaaactccttcccacgactcagaaagacagaaccctcacccttccgagcctgggttccggcggaggaagggttaagtggggattgcgcggggcgggggcgggaggaggtggctcggaaacagccccgacgcggcgcgctgacgccacggcgctcacgcaagggaatcttccatcctccccttccccccaagtcctgtgccccaggtgtcctgctccgaggcggggcgcgcggccgatcgtggcgctcgtggaatccccgcgcaaggggaattcctgctcagccccgcacgggtggccatccggaaatcccagggcggggcagaggcagggtcaccgccagcgtagaccctgaggccaggctccggacccttccccaccgagacccacgccgattttaagcaaccacgccccccccccccccccccgcactcagcctagtccctgcttctaggggtaggagtctcggttgccagcaacccctagcacctccaaggacccagagatccagcctcccaagcctcccagcccttgcaccctcggggccctgcgatcctggatccccaggcccctgcacccccaggacccagaagtctgggatcccagccgcccctctgtcacgatccacgatcccctcctcctccaaacacctagggccctcactctcgggataaaggactgacgcttcagctccgtccctcagggcctcgggagtctttcgatcctcagtccctcactctcttagggggccgaacgcgtcctgcccgcgcccattacctcggggattccgtggcgtggattgcgggcccccagggccgcggcctcggcgctgcgccagcctcgctgtttcccccgcggagccgccgccgggtccccgatcttgggtccggtacccgcgagtttttaaactaggggttatggcaccgcccagtcctgggcagggcccgcccacaggcctgggagtccccgggtcgcgctccggcgaacgcagtccctgaatgggcgcggcggacttgggaggcggactactcagtccccccgggaaggagggagctggggtccagatctttgctctgaaggagcctagggcaccgggctccaagaggagggagaaaccggggggcctggatttcttttcttttctttttcttttttttcttttcttttttttttttttttttttttgttgttgtttttgagaaggagtctctgtcgcccaggctggagtgcaatggtgcgatctctgcaaactccgcctcctgaattaaagcgattctcctgcctcagcctcccgagtagctgacactacaggtgctggacaccatgcctggctaatttttgtatttttaggagagatggggtttcaccgtgttggccaggctggtctcgaactcctggcctcaggtgacccgcctgccttggcctcccaaagtgctgggattacaggcttgagccatggtgcctggctggggcctggatttctgggtctgtgtctaagggggtgctggaggctttgtctcctgggtcctgcccatgggggtaggggtaggagtggggatggagatggggtgggggcagggagaatattactgggtccagagggaggcaggactgggggtctagactcccagaggaagggtctgtgggtaagggtatagggtgtggctcaatttctccctctcccctacatcaccctttttagaggtctggtttcatttactcattcatcatttaaaataatttattgcagcagaggaggcattttgctgtgtattgtgaactaagcaggcaggaattcccagccctggagctggcattccagtgggaggccactctcagtttcacttggtgacctttcacagcactgaccatgttggccctatttctcccctgcttgcttgcttttctattttattttattattacatttttattgttagagagagggtctcattctgtcgcccaggctggagtgcagtggcaaagtggtgagatctcggctcactgcaacctccacttgcctcagtctcccaagtagctgggattacaggagcctgacaccatgcccgggtaatttttgtatttttgtagagacggggtttcaccatattggcttgaactcctgatctcaggtgatccccccaccttggcctcccaaagtgctgggattacaggcatgagccactgcggtggcctctcccctgctttcaagatgccatgctctcaggggtcccctccctctttctccatttccctggcaaagttcctcctcttcccccattcagtgtgtgttgtgataggggcagaatcctgtctgcactcacttccttggtgatctcacccagtcttgtggctttaagtaccatccataagccatcaacccccaaatttacatctccagaccagccttatcccctgaactcctaaatgcagtgaggttattcagcatctccacagggagattgtcaggcatttccaaccctgtatgcccaaacctcgtcactttccccgcaaacccacttccctacctttcatctctgccagcagacactcccatcttctcagcgtttcatgccagaaggcttggctgtctaggatccctctcaaacacacccacattcatttaatcagcaaattttcttggccctacctccaaaatatttccagatctccctagcctgcacacccttgccacctgtcattcccacttggaccaggccagcagcctccctggtctctctgaccctccccctgagttcgttcaccaaaggcagtaacggagacaccccctcaacacacacaggaagcagatggccttgacaccagcagggtgacatccgctattgctacttctctgctcccccacagttcctctggacttctctggaccacagtcctctgccagacccctgccagaccccagtccaccatgatccatctgggtcacatcctcttcctgcttttgctcccaggtgaagccagtggttacaggggatggtaggcagagcgtttgtgagatgggtgcttgggtgacgtctgcagggacgggtgatgaaagtggggttcttctccctgcaccccttcccttctgggagatccattctgcttcagggcctgggtccttgggggcggaagggggtgagacagggagttctggaggggctgcctgttagcgtccccttctcatggctgggtctctgctgccacttccaatttcttgtcactctccatgtctctgggagtccccttcccatgtggtcctgttccatctctccagcctggagattacttctcaggacactacctttccttctctacaccctattttttggtttgtttattttgagatggggtcttgctctgttgtccaggctggagtgcagtggcacaatcacggctcacggcagccttgacttcctgggctcaggtgatcctcccagctcagcctcccgagtaactgggattacaggtgtgaaccaacacttccagctaatttttgtatttcttgtagagacgaggtctcactatgttgcccaggctggtctcgaactcctgggctcaagcgatcttcctgcctcggcctcccaaagtgctgggatgacaggcgtgagccacggtgccaggctgagcattctgttttgtggaccttctctccaccctcatccaccttctttctctttccacagtggctgcagctcagacgactccaggagagagatcatcactccctgccttttaccctggcacttcaggtatcacttccaccccagaagcttggccagaggctcccagaacaccccagtggttctccaggtcaccatcccacctcccgtccccaaatcagaggatccgtgtccttctccgagtcccagaatcagcgacccccagcctgtgttcaggagcaccccgtgtgcccgccgcacagccccgagggtcctgggacaccccagcctctctgcatctgtctcccgtttcattccccaagcgcaactccaaggaacctgggacccgccccctcgcaggggacttcctctctgcctgtggccaaagcacagccccaggacgcagagcttgagttgtctccctgttccggcccccactctccaggctcttgttccggatgtgggtccctctctctgccgctcctggcaggcctcgtggctgctgatgcggtggcatcgctgctcatcgtgggggcggtgttcctgtgcgcacgcccacgccgcagccccgcccaaggtgagggcggagatgggcggggcctggaaggtgtatagtgtccctagggagggggtcccagggagggggcccttggggaagccctggaggaggtgctggggaaaccctgggggaggtgcctgggggaacccctgaggaaacccctgaagcagggggtccccagggaagtggagatatgggtggtcaagcttcatgctttctctcccctatccccagaagatggcaaagtctacatcaacatgccaggcaggggctgaccctcctgcagcttggacctttgacttctgaccctctcatcctggatggtgtgtggtggcacaggaacccccgccccaacttttggattgtaataaaacaattgaaacacctgtagtcgtattctttctcaaagaaccccagagttcccaaagcctccctcccatgaactgtttctggatccaaggccccctcagaacccccacatgtccccatcccatcagcccaaggatctggcataatgtttttgtgcttcatgtttattttaggagagtattggggagcggtctggtctctcagggatggcactctgtgggtctgtatcgcggtaggagttggaatgaggtgcagggtgggcttcaggaatggctggatccaggtatcatgttgctgactgtcatgattcgggctcatttgtaatacggcctctgtgtgttgaggtcgctgtagacatccgacctctgaccctggagctcctaaaggaatgggggccatcagtggaagggacccaccaaataaaatccagccttctcccagtggcctgcaaggcccctggcagcttcttcagccttatagccatgaaagagatccggattttattcaagtacattcaatgttcccccttctcctctgcctcatcagtgtgccccagcctcagggtccctgcgtgtgctgtttcctctgcctaaaactctgttcccctagatcccctctcccttcaagtctcagctcacgtcacctcctcagagaggcatttctcaatttcccctctgtagtttcttccccccacactccagccactgtaaaaaaaaaaaaaaaagcctgtttatttcctttactgtgcctcccaaaattattttatttgttcatttgctttaagtttgtcttaactaggatataaactctgtcactgtgtccccagcatttagcacttataggtgctagacacatccacagagggaataaatacatccgggtaatgctttgccctaaaatttcactgccaccagtaactggaagggcccctcggtcttctggatatcacagagccaaacctgagattcttagacttcacaaagaaactttatccacaagtgaggtgaataggcaaagctggttgcagacaatatatcagacttcacacagcagtgttcacacttggggtagggggaggatctatgtggcccccaggggcaggcctcagacagaaaccctaaaatcatatatgatgactagtctgggcgtgcattcttcaggggagaggtcttagagaatctcatgaccccctaaagggttaaaaaggaacattgacagagagggggatagatgactagattctcttgtatactctatagtttttaaaaagagcttcagccaggcatggtgactcatgcctataatcccagcactttgggagaccgaggtaacaggatctcttgagcccaggagtttgagaccagcctgggcaacatagtgagaacctatctctactttaaaaaaaaaaaaaaaattaaggccgggcgcggtggctcacacctctaatcccagcactttgggagggaaaggtgggcggatcacgaggtcaggagattgagaccagcctggccaacatagtgaaaccccatctctactaaaaatacaaaaattagccgggtgtggtggcatgcacctgtagttccagctactcgggaggctcaggcaagagaatcgcttgaacctgggaggtggaggttgcagtgagctgagaccacaccattgcactccagcctgggtgacagaatgagactccatctcaaaaaaaaaaaaaaattaaagtagagaaagaaaaaagagcttcaagaatactcaaccagcatggttgcttgagcctgtaatcccaagattttcggaggctgaggcgggaggatcacttgagactgggagtttgagaccagctggggcaacatagtgagacccctgtcttttttttttttttgagatggagtctcactctgtcgcccaggctcactgcaacctccgccccctgggttcaagcgattctcttgcctcagcctcctgagaagctggaattacaggcgcatgacaccatgcccagctaatttttgtatttttagtagagatggggtttcaccatcctggcctggctggtcttgaactcctgacctcgtgatccacccaccttggcctcccaaagtgctgggattacaggtgtgtgccaccatgcctggccaaaaaaaaattttttttaattataaagaacatttacactgctctcagattatatgcacaattttgtattttttgtgtagatttttctgggagtctagattttcttagtttctcaaagggatgaagggtcctcaaacccaaaaaagagattctaggactcctctctttagagttaccaaggtagggctgaatgacattctctgccctactgagagcgtctcccagaaatcagtcgtcctagggctgggtttcttccagaaaattcctggcctgacttctggcaaggcctgtgtttacacttacaaaggcaaagccacccttttttttttctttttaactcttcacgcttttttttttttgacagagttttcctcttgttgcccaggctggagtgcaattgcgtgatcttggctcactgcaacctccgcctcctgggtcaaaggattctcctgcctcagcctcccaagtagctgggattacaggcatgcgttaccacgcccagctaattttgtatttttagtagagacagggtttcaccatgttggtctcgaactcctgacctcaagtgatccacccgcctctgtctcccaaagtgctgggattacaggtttgagtcaccgtgcccagcccctcttcacacattttaagctgaccataagcttgtggttgatcattcggcccagttttggacagatgtcccatgtgccttcaaggtttgggggtgctttaggcagagtggctttgaggtccctctgatggcatgaaggagtatctggggcagatatccctggcaggagtgaaatgtgaggaggacagtctggttttctcacctgataaggcgactcggtctcagtgatacgctgtttccgggtcgctgctggaggtgaggggtgttgtggggtgcagagacaggcagagtggtgagttgagggtgttttgtcattccaaatcagcacctccattaccatccctttggatgtttgagatctgggagtttacccagccccccacccccatctaggcaagtcctcaggatgtcccctgctagccccactcaccctccgcagcccctcgcccccgagggaccagccggcccaggaagtacacggccagggcaatgagcactgtcagcaccaggtctcccatcacgatccctgccagcacgcccgggctcaccgtagagcaactgcaatctgcagcacaggggtcaggggaggtcagtgtgtgctgggaactgtggggaggggggtcagcggcagggaggtttggaaagggtgtgggagagacggagacagggaggtctctgggaggtagagagagggactgctgggtctaggcctaccgctctgggcctgggcctggacaggacggagacctgaggaggaaaaagaaggtaaactgaggcacagagttatgacgggggtgggggaggcaagtttagaagccagggaaggtggatcctgacagccaagaggttagcaagggggagagcgtgtctggcgggactcagggggctggcgtctgggccaccggactatgtgcgttacttctgcacaacttgtcctgtggcaacacacttagatgtctcttctcccctgcttgtagcggacgacaaaacttgggggcttgggctctgggagaaacccacaggctttgggaggttggggacctgctcccatcccaacacccacttttggttctctcgttccaccccactccctgccctgccccaagctgagcccagggacccgggaggcagccacggaagcccctaactcaccacttacagccagcaggagaggcaggagcaggagcctgctgcagggttcaagtccccccatgaagccggatgctgctggacaccacagtgtaagggccggtgggatgtggcgcagcgtccaggcaagtgaaggaggaagtctgaggcgggtggtggcagaagggaggaggagacaggggaggagagacagaaacaaaacccaagaaagaatcaggcccagacacccaggggccatgccacaggcccccagcaactagacgtgaagggcaaagggtacgtgaagcacaaacttcacctccgtccccagtcaggggtcagacatcgttttaacaggagggtcagtgtcatgaccttcctctggctgattgaaaccagctctgcctcttcctggctggtcaaccttgagtgcaatggcacggtctcggctcactgcaacctctgcctcccgggttcaagtgattctcctgcctcagcctcccaagtagctgggattataggcgcctgccaccatgcccggctaattttttgtatttttttttcttttttttttagtagagacagggtttcaccatgttggccagctggtctcaaactcctgacctcaggtgatccacccaccttggcctcccgaagtgctaggattgcaagtgtgagccaccgcacccagctccaacctcagtttcttcatctgtaaaattgggagtaaaatgggacctactttttagagttgtggggattaaatgaattaaagttcctagaccagggtctgacccttgtcagctttttaaaagcatcagctatgatgatgattatttaatcatcagaaacttgtgctgtttaaaggatattaaaagagccagcagcatgtgggcactaatgacatgcaggcactctgtcccaagcgttaaatcattcagtccccgcaatgcccttctagggcacatgctcttatcatccccattgttcagagaggtagagacgcttgcctaaggctgcacagcaaatcaaggtggaaatggaacccaagacccaaaatcaggtttttgactagggaagagtcagggggaaaaacaaagatgaaagatggggaaggagaaaacagcggcaaagctgagaaaggtgagagtaaggcagtggcacagacacagaggcacggctggcggcttggggagaggcaggtggctggctctcctgctgaatgaggaagtggctgggagcaaggcccaagggaggccaccccaaggagacggggacttctagcccccagctggagcctggggctggggaaggaggaacctgaggttagggtgctggaggatgagacagctgcaggaagcccccctcccccatccacacgtcacacccaccgctccttgggcctgggcttaggagaaaaaaggggaaactggattctggtcacagggcagatgcccagtggcctgtgggggaagggaggagaggagatttggagcctggaggagggtcaggtcccagctcagcccacggtcaccactgttcaggcctggctgagtcccctcccttaaaaacccaagcctctcccattgtgtctagagcgagcatggagggaacagaccctgtaggtcctcccgggcacaccaggccacccaatgtgttggagcagagtgggcgagggggcagtcagagaccagagcagggctctgagccaggagggccctgacctgactcaggggttcacaggttccctccggccgcaggtggggagcagactgtggaggcagggactggagcagggaggccaggctgctgggatatttgtgaggatattgtgaggtctattagaataatgcctggttgagttcaagaccagcccggccagc[131 bp omitted]gaaacccggtctctactaaaaatacaaaaaattacctgggcatggtggtgggcacctgtagtcccagctactcagaaggctgaggcaagacaataccttgaacctggaaggtggaggttacagtgagctgagatcgcgccactgcactccagcctgggcgacacagcaagactctgtctcaaaataatgataataataataaagggccaagcgcggtggatcacgcctgtaatccaacactttggaagaccgaggtgggcggatcccctgaggtcggcagttcgagaccagcctgaccaatatggagaaactcggtctttactaaaaaatacaaaattagcctggcgtggtggcgcgtgcctgtaattccagctactcaggagcctgaggcaggagaatcgcttgaacccaggaggcagaggttgcagtgagcagagattgcgccattgcactccagcctgggcaacaaaagcgaaactcagtctcaaaataataataataataataataataataataataataataataataataaactttcactcctgctctaaaacttaccttggtttctcactctgccttatgtcccttggtcaaattcttttttgaggaggcaaggattgaggttgctgcagacccctatggattcactgctgcgaacatacttcggtaccgtgtgacttggatatgttccatgctaaaaattagtatgtccagtctcgagttctcagcttagcttgataaaaatcctccctcagccaggtgcagtggctcacacctgtaatcccaggcgtgattttggattttgggactttaggaggccaaggagggtggatcacctgaggtcaggagtttgagaccagcctggccaacatggtgaaaccctgtctctactaaaaatacaaaaactagccagacatggtggcaggcgcctgtaataccagctacttgggaggctgaggcaggagaatcgcttgaacctgggaggcagaggttgcagtgagccaagatcatgccattgcactccagcctggatgacaagagtgagactttgactcagaaaaaaaaaaaaaatcctccctcagtccttcagcatcagcctcctagtctcatcctccccacttcagccaggcctgggctgtccccagaagatattccccaagcaccatccagtcatacggatgtggccataggggctggaatcagggtcctagagcgccacctttagttgctgagatgtgggaaagtccaaggggtccccaaagaatggactcgggtggtagcagacatctgtgggctatgtgggctctttactaaccagaagtggaatgtttcaacattttagcaaccaatacaactgtgctgatgcagaccacaggtggcaggtctgggctggcctctgggctagaggacggataaaacactctctttggccaggcatagtggctcacacctgtaatcccaccactttgggagactgaggcgggtggatcacttgaggtcaggagtttgagaccatcctggccaacatggtgaaaccccgtccctgctaaaaaatacaaaaattagccaggcgtggtggtacacatctgtaatcccagctactcaggaggctaaggcaggagaatcgcttgaacctgggaggcagaggttgcagtgagccgagatcgcaccactgcactcaagcctgggcaacagagcaagactccgtctcaaaataaacaaaacaaaacaaaacaaaaaaaccctccctctttggatgaaggaagaagctgagattcagggcacccagcaacaaggcgctgccccaagacactgccagactcctggaagctgagctgagggcctccacacaagatcaagaggtgagtgtctcaccctctctgggcagcaggccaagagttggggaagccaacgctgactttcccagaaaccaggtagtgtgttggcctgtgaccagctcacttctgtggaagctacagtccctccccactctcccagcttccacactggcccctccacagcctgtcctcctcaaagcagctggaagctttgtaaaacatcagatgaatagaggccaaggcagaaggatcgcttgaggccaggagttcaaaaccagcctgggcaacataacgagaccctgtctctaattcttttttttttttttgagatggagttttgctcttgtcgcccaggctggagtgcagtggcgcgatctccgctcactgcaacctccacctcccgggttcaagcaattctcctgcctcagcctgccgagtagctgggattacaggcatacgccaccatgcttggctaattttgtatttttagtagagatggggtttctccatgttggtc[132 bp omitted]gcctgtcatgccaacactttgggacaccaaggcaggcatattacttgacctcaggatttcaagaccagcctgggagccaggcgtgatggctcaagcttgtaaatcccagcactttgggaagctgaggcaggtgaattgcttgagcccagaagtttgagaccagcctgagcaacagggcaaaatcccagctctacaaaaaatacaaaaattagcccagcatggtggcacctacctgtagtcctagctactagggaggctgaggtgggaggatcacctgagcctggggaggcagaagctacagtgagctttgattgtgccacagcagtccagcctgggccacagagtgagaccctgtctcaaaaaagaaaaaaattaattaatttaatttaaaaatcagacaaatagcctaatttttaagtgaccaaaacatttgaacagacacttcactaaagatgagacgtgaaggccgggcgtggtggctcactcctgtaatcccagcactttaggaggccaaggtgggcggatcacctgaggtaaggagttcgagaccagcccagcaaatatggtgaaaccacatctctgttaaaaacacaaaaattatctgggcgtggtggcagtttcctataattccatctactcaggaggctgaagcaggagaatcccttgaacccaggagacagaggtttcagtaagccgagatcgcaccgctgcactccagcctgggcaacagagcaagactccatcaaaaaaaaaaaaaaaaagccagcgtggtggctcacgcctgtaatcccaacactttggaaggccaaggcgggcagatcacctgaggtcaggagttcaagaccagcctggccaatatggtgaaaccccatctctactaaaaatacaaaaattagccaggcacggtggcaggcatctgtaatcccagctgcttgggaggctgaggcaggagaatcacctgaaccttggaggcaaaggttgtagtgagctgagatcaagccattgcactccagcctggacgacaaaagtgagactccatctcaaaaaaaaaaaaagaagaagaagaagaagagacatgaatggccaggaagcctgtgaaaaagtgctcagcactattagtcattagggaaatataaacgaaacctcagtgaaatgtcactgcacgcccacttaaatgactaaaattaaaaagactgaccctatcgagtgtcagcagaaatgtggagcagttggaaatctcagacactgccggtggaaatgaaaaatagagcaaccgctttggaaaatagtcggttgtttcctttaaacattctgcagtagctcacacctgtcatctcagtgccttaggggactaaggtgagaggatctcttgaggccagaagttcaagatcagcctgagaaacatagcaagataccatatttacaaaaattgttcttttttttgagacagagtctcattctgttacccaggctggagtgcagtggcacgatctcagctcactgcaacctccgcctcctgggttcaagcaattttcatgcctcagcctcctgagtagctgggattacaggcacccaccaccacgcccggatagttttttgtatttttagtacaggtgggctttcaccatgttggtcaggttgttctcaaagtcctgacctctggtgatccaccctcctcagccccccaaagtgctggaattagaggcgtgagcaactgtgcctggcctaatttttctatttttcatacagatgggctttcaccatgttggtcaggctgatctcgaactcctgacctcaactgatccgcctgcctcagcctcacaaagtgctgagattacaggcgtgagccactctgcctggcccaaattttttttttttttttttttttttttttgagatggagtctctctctgccgcccaggctggagtgcagtggctcgatctcggctcattgcagcctccccgtcccagattcaagcgattctcctgcctcagcctcccaagtagctgggattacaggcatgagccaccacacctggctaatttttgtatttttttagtagggacagggtttcgccatgttggccaggctgttctcacactcctggcctcaagcgatcctcccacctcagcctcctaaagttctgagattacaggcatcagccaccatgcctggcccccaaaattgttttaaattagctaggcgtggtggagcacacttgtggtcccagctactcaggagtctgaagcaggaaggttgcctgaacccagggattggaggttgcagtgagctatcgtggcactactgcactccagcctgggtgacagaaggagaccctgtttcaagagaaagaaaaaaggaaggaagaaggaagggagggagagagagagaaagaaagaaggaaagaaaagaaagaagaa[143 bp omitted]gaaaccctgtctctactaaaaatacaaaaatattagccaggcatggtggtgggtgcctgtagtcccagctactcgggaggctgaggcaggagaatggcgtgaacccaggaggcggagcttgcagtgagccgagattgcgccactgcactccagcctaggcaacagagtgagactccatctcaaaaaaaaaaaaaaaaaaagaaggggatgtgtgatgtgttcaatgacattagggaacccactgaatctctaggaggtccaagaaatcagtccctgagctacacagatcagatcctactcctgccttggggagcaaacacctcagctccactgctaaagtgatctgggaccttctgtgaaggcttctgtcatttgcatcagacactgggggaagtttggcaatttctaagaaatttaaacataaacacaccatacaacccaacactcccactcctaggtatttaccaaagagaagtgaaaacgtgagtttatacaaaaaccagtaccatatattaatagtggctttgttcataattgccccaaactggaaacaaccgaatggttcttcactggatgaatggataaacaagttgtttatccatttttttgagatccacacggtgggatactactcagcaataaaaaggaatgaactatttttacttatctttttattggagaaagggtcttgctctgttacgcaggctggagtgcagtggtgcaatcatggctcactacagcctcaacttattgggctcaagcgatcctcccactttagcctcccaagtagctgggactataggtgcgcatcaccatgcccagctaatttttatatttttcatagagatgatgttttgccatgttgcctgggctggtcttgaactcctggcctcaagcgatcctcccacctcattctcccaaagccctggaattacaggtatgagtcactgcacctggcctcaccaatatttttttctccccttcttcttctataggtgtgagccaccacgtctgttttttttttttgttttttttttttttttgagatgaagttttgctcttgttgcccaggctggagtgcaatggtgcaaccttggctcactgcaacttctgcctcctgggttcaagcgattctcctgcttcagcctcctgagtagctgggattacaggcatgcaccaccatgcccagctaatttttgtatttttagtagagacggggtttcatcatattggtcaggctggtctctaattcctgacctcaggtgatttgccagcctcggcctcccaaagtgttgggattacaggcgtgagccaccactcccgacatcctaatttttatttttatttttttagagatgtgatctcactctgtcactgaggctgtagtgtactagcaggaacatagctcactgcagcctcaacctcccaggctcaaataattttcccacctcagctctgcaagtagcagggactactggcaggcaccgccatgccagctaatttttaaatttttttgtagagatagtgtttcaccaccttgcccaggctggtctcaaactcctgagctcaggcaatccacctgccttggcctcctaaggtgctgggattacaggtgtgaacccccttgcccagccaccccttcctctactgaaacagaatttgtagttgggcatgagattccctagccaagaagatgtctctcatcctctttggagcctgttggggccatgtatctgttttctggcaaacggaacttgggaagaaatgatgcgggcaacttccagattgtgtccctaaagtcagagtatgccctctccttttctgctcttcctattggctggaatgtggcccttattctggctgtgggcacccactttaaccacaacagctaacattttgaaggctttttaagtagaatccaagtaatgcttgatggtttcatcaattgtggttcatccataacataaatagagtcatggccaggcatggtggctcatgcctataatcccagcactttggggggctgaatcaggaacctcaattgtggccaggagatcaagaccagtccgggcaacatagcgagaccttgtctacgaaaacaaacaaacaaacaaacaaacaaacacatcagccgagtgtggtggtacatgcctgtagtttcagctacttgggaggctgagataggaggatcacctgagcccaggaggttgaggctatggtgagtcatgatttgattgggccactgcactccagcctgggcaacaaggacagagcaagactctgtctcaaggggaaaaaaaaaaaaattaagaacttgccacagtggctcatccctgtaatcccagcactttgtggggccaaggcaggaggattgcttgaggtcaggaggtgtagaccggcctgagcaacatagagagacactctctctacaaaaaaaattaaaaattagccgagcgtggtggcacacacctgtagtctgagctacttggggggctgaggtgggaagatcacttgagccctggaggtcgaggctacagtgagccgagatcacgccactgcactccagcctgggtgacagagcgagactctgtctcccaaaaaaaagaattaatggccgggcgcggtggctcaagcctgtaatcccagcactttgggaggccgaggtgggcagatcacaaggtcaggagatcaagaccatcctggctaacacggtgaaaccctgtctctactaaaaatacacaaaaaaattagccaggcgtggtggcgggcgcctgtagtcccagctactcgggaggctgaggcaggagaatggcgtgaacccaggaggcggagcttgcagtgagcggagatatagcgccactgcactccagcctgggcgacagagtgagactccgtctcaaaaaaaaaaaaaaaaaaaaaagaattaacattcaccaaaagatatcttagaatgataatgtggctatatatttagatctatattttaaaaggtcattattacttagcgatatgtacttcctacaaatttgggaggtgaaataataagacgtctggaaagtgttaaaagcaatccaataaagaagaagtaggttcaggtagagagggaataagattagcacgaattgacaattattaaagctggcaataagtctatgggaattcattatacgattctctctacttttgtgtatgtttgagattttttattaaaaaaaagataaccattagaaaatggttacagagtaggagaagaaatttgtaacacataatgcaatgaatctgaacatatcctgcacacataaataactccttaaaaacaaacagcaaaccccagaagaaaaattggcaaactcaagtagacacttaattaattaatttaatttattttattttattttttggagacagtctcactctgtcacccaagccggaatgaagtggtgcaatcttggctcattgcaacctccacctcccaggttcaagcgattctgctgcctcagtgtcccgaatagctagaattacaggcacatgccaccacacccggttaatctttgtatttttagtagagacggggtttcgccatgttgaccaggttgttctcaaactcctgagctcaggcaattggcccaccttggcctcccaaagtgcttggattacaggcatgagccactgcatctggccaattgatttatttatttgaaacagggtctcactctgttacccaggctggagtagagtggcagaatcctagctcactgcagcctcaacctccctggcctaagccatcctcccacctcagcctcccaagtaactaagaccataagtatgggctactatgcctggctaatttttaaatttttttagaaacagggtcttgcccaggctggtctcaaactcctgggctcaaggcgtcctctggccttggcctcccaaatttcggggattgcaggcatgagccacttcaagcaagcacttcagaaaagaggaactctaaatggcaataaaggtgtgaaaaggtgctcatcctcagaaggagaacaaacattaaaacaatgtaaggcctggtgcagtggctcacgcctgcaataccagcactttggcaggcggaggtggaaggatcacctgaggtcagtagttcaagaccagcctggccaacatggcaaaaccccgtctctactaaaaatacaaacatagccggcatggtggcacatgcctgtaatcccagttacgaggccgaggtaggagaattgcctgaacccggtaggcaaaggttgcagtgagccaagattgcaacactgcagtccagagtgggcgacaagagtcagactccatctctaaaaacaaacaagactagtagcgcaaaaccgctccacacctttccctctacccctagaaatgtcgaaattttcaaaatccgacactaccagatgtggtgaaatgtggagccacagaaaatctcatacacctctgaaggaggcagaggggttgaaccactttgaaaaacagtttggcactttacttcccagagacccaacttccgcccctatctgtatctgagagagatgggtgcaatagatgccaggagccttgtgtaaggatagtcaccctatttgtaaggccaccctatttgtaaggcttttcaaaagaaacaacccaaatgcccatcgcaggagaaaggatacataccttggggcatatcacacaatggaataccgtgtaaccatgggaatacataccctagatccatttgccacaacatggacttatctctcaaagataatgttgagtggaagaagaaagaagccgcgggcacggtggttcacgcctgtaatcccaccactttgggaggccgaggcgggtggatcacgaggtcaggagatcgagaccatcctggctaacacggtgaaaccccgtctccactaaaaatacaaaaaattagctgggcgtggtggcgggcacctgtagtcccagctacccgggaggctgaggcaggataatggcgtgaacccgggaggcggagcttgcagtgagctgagatcgcaccactgcactccagcctgggcaacagagcgagactctgtctcaaaaaaaaaaaaaacccgcatacaagagtatatacaatatggttcctccttacatagagttaaaaaatagtccaaattagactacactgttttaggaagcatacatgtaaggcaacattattattattattattattattattattattattgagacggtctcgccctattgcccaggctggagtgcagtggcccgatctcggctcactgcaagctccgcctcccgggttgatgccattctcctgcctcagcctcctgagtagctgagactacaagcgcccgccaccacgcccggctaatattttttgtatttttagtagaaacaaggtttcaccgtgttagccaggatggtcttgatctcccgacctcgtgatccgcctgcctcagcctccgagagtgctgggattacaggcgtgagccacggcgcctggcctattattattattattattattattattattattgttgttattattgtagacagggtctggctctgtcacccaggctggagtgcaatggcacaatcactgcagcctcaaactcccaggttccagcaatcctcccacctcagcctcctgggtagctggtactacaggtgcatgccaccacttctgggtaatttttttttttattttttgtagagatgaggttcttactatgttgcccaggctggtcttgaacttctgtcctcaagggatcttcttgcttcagcctccccaagtactggagtaacaggcgtgagtcacctcgccctgccaataggtggcaaaataattaagaaaatcagaagtgttccatcagaaccaacatggtggttgcctttcaggggacagtacactttgtaaataaaaaggaacaaaagaggaatgttctagaatacatcaattacatttatttatttatttatttgtttatttatttatttatttttaagacagggtccccctctgtcacccaggctggagtgtgatggcacaatctcagctcactgcagcctcgacctctggggctcaagtgatcatcccacctcagctttccaagtagctgggactacaggcgcatgctaccacacccagctaattttttgtattttcggtagagacggggtttcgtcacgttgcccaggctggtctcgaactcctgagctcaggtgatccgcccacctctgacttctctcttcatgtggaagtagatgcctgaataattttactcaatgattcactgtgctgtgcatttgtcttcatctataggcattttgtatgtcacaacagataaagtttaaaagatctagccaggcatggtggctcatgcctgtgatcccagcactttgggaagctgaggcgggagggtcacttaagcccacaagttcaagaccagcctgggcaacatagcgagaccctgtctctacaaaaaaatttaaaaattagccaagcatggtgatgtgcacctgagatatcagctacacaggaggctgaggcaggaggatcccttgagcccaagaggctgaggctgcagtgagccatgtttgtgccactgcactccaatctgggtgacagagtgagaccctgtctaaaaaaaaaaaacactatgcaaaaattagccaagcttggtggtgtgcacctgtaatcccagctacttgggaggctgacgcaggagaatcgcttgaacctgggaggtggaggttgcaatgagccaagattgtgccattgcactccagcctgggcaacagcagagactccgtctcaaaaaaaaaaaaaaaaaaaaaaaaactaactaataatgcttgctcattataaaaaatttgaaaaatgcagcaaaataaaaaagaaaaagaaaattcacccacttctaagagacagcttctattaatgtttaattatatttcctgtcttttactgggcatatttgtatgtattctgaccatcctgtatatagaaatttgcatcctgaccatactctatatgcaaatttgcatctggcacatttttgcaaacaatttttattaacttggaatgaacagctgtatttccttcaactactcaaatatgacctgacctcactattgtacaccacctttttgctctggaaagtaaccaaagagatgatcctcacagtccttagggcagaataaattatgttttttcttttttttttcttttttcttttttttcactctgttgcccacgctggagtgcagtggcgcgatcttggctcactgcaacctctcactcccaggttcaagtgattcttctgcctcagtctccccagtagctgaggttataggcgtgtgccaccacacccgcctaatttttgtatttttagtagagaccgggtttcgccatgttgcccgggctgatctcaaagtcccggactcaggtgatccacctgcctcagcctcccgaaagtgctggaattgcaggtgtgagtcaccacacctggccagggcacaatacattttttgttttgttttattttttgttttttgagacgcagtatcgctctgttggccaggctggagtgcaatggtgtgatcttggctcactgcaacctccgcctcccaagttcaaacgatcctcctgcctcagccccgctagtagctgggattacaggcacgcaccactatgtctggctaatttttgtatttttagtagagacagggtttcgccatgttggccaggctggtcttgaattcctgatgtcaagtgatccacccaccgcggcctcccaaagtgctgggattacaagcgtgagccaccgcaactggctttttttttttttttttttttttttgagacagagtctcgctccgtcaccaggctggagtgcagtggcacaatctcggctcactgcaacctccaactcccaggtacaagtgatcctcctgcctcagtctcccgagtagctgggattacaggtgcccaccaccacgcccagctaatttttgtatttttagtagagacggggtttcaccatgttggccaggatggtcttgatctcttgaccttgtgatctgcccacctcggcctccctaagtcctgggattacaggcgtgagccaccgtgcctagcccagaataaattaaacattaaagcttagatttcatttctcagttcacttgtatttagaaagagctgtgggggcgaatctgtttcccttttcctcttccccctgcctgggagccatcctggatctttcaggccagtgctttcccagggatagtagcacaaaagtggaagccacctggatctctgactccgtgaagccttcacaccaattctgcattctttatgtttggtcaatttgtaggagagaaataaagttcgattttgcttaagccactattatcaatttcagctacttgtatttcttgtctaacaaacagtgctcatgaaacatgatccatttctcatattcctgaatctctttagaaacaccagtcttgaggctgggttcagtggaaggccaaggcaagagaatcacttgaggccaagagttcaagaccagcctgggcaatataacatctctacatacatgaaataaaaaaaatacgacgtgagtggatcatctggggtcaggagttcgaaaccagcctggtcaatgtggtgaaaccccgtctctaccaaaaatacaaaaattagctgggcatggtggcacacaccagtaatcccagctactcaggacgctgaagtgggagaattgcttgaacctgggaagtggaggttgcagtaagcggagattgcgccactgcactccagcctgggtgacagagtgagaccctgtctcaaaaaaaatacttaaataaataatttatggcgtcataaaaatccttgtaatgaaatcttttcctacttgctggagtacttccaggaagtaaattcctagaagtagaaataatggaacaacagatatgcgcattttcaggctttggatgcaggctgcccagttcttccgaaaggtcatcctcgtttgcagccagcaatgggagtggggtctcccatgtcgctgtgctctccttggctatagggaaccagatttctgatatctttgctgatttgacggcaaagaggagggtttcagtacttcaagttcagttattactggtggtaaacttggctttgatcaatttcagctatttgtatttcttttgtgatctgtcttttcctctcatttgcccatttctcttttggctgattggcttctcatattaaatttattaatgttttcattaccttaaggatgttaactatttttttcttttgtgatctgtcttttcctctcatttgcccatttctcttttggctgattggcttctcatattaaatttattaatgttttcattaccttaaggatgttaactatttttttcttttgtgatctgtcttttcctctcatttgcccatttctcttttggctgattgccttctcatattaaatttattaatgttttcattaccttaaggatgttaactatttttcttgttttcctttaaaaaaatttttttttaaagagacacagtctcaccctatcatccaggctggagtgcaatgacagatcacagcttgctgtaatctcctgggcacaagagatcttcctgccccagccccccgagtagctgggactacaagcatgcaccaccacacctggctaattttcgtattttttattagagacaggatttcaccatgttgcccaggctggtcttgaactcctgagctcaagggatcctcttgccttggcttcccaaaatgctggaataacaggtgtgagccaccacacccagcctcttcccacattttactctagtccatctggaatttattttcatttatcagtctccaaattaatatttgtacctcaaatggctaagacagaaatccaactgctgtgacattatgcttctgttctataatgcattcttgctcttctgctctgtctttggccagtcattctggtacattacccatcaagattgttcttacactgaaacacactttaaattatgtgagcttcatgatgttactatcttgtaaccaggctctatccacagcacctagagcctggcacatggcaggatctcaagaaatatctggcaaaagaatgaattactgaatgaataagtgggaaaataaatgaataaatacaatatgcagctgagcgtggtggctcacacctgtaatcccagcactttgggaggccaaggcaggaggattgctcagccagttctggccccactcaacagcccagctgagctcgaaaccaacagccagtgacattgccaaccatggacatcagccaccttggacatcagcctggttgaactttcacatgactccagctccctccaacatctaacttcaccacatgagtaacaccaagcaagaaccaccctgctgagcccttcctaaattcctgacccaaaaactcagagggaaactaaaataagccacttcacttggggataatttgttacgcagcaatagataactgaaacactgggtttgcaaactcaaccctcactctaaccctacagcatccagatgtttaatgtaaacagtgagttgggcctggtgcaggtgagcaggtgcggtgggagccctgaggcactggggaacctgtgctgcactgccctgagctgtatgtctccccagatttgttccttgccctcccctttcttcccccatcctaggctgctatttccagtcttccctccagctggggttgaatcaatgggaagctcaggtaggaggctggaggaccagaacaagcagccagggtcattccactccccaagggtcattctcctccttctcctggtagttatgcctcctctagagccccagctcctgccagccagacaatcccactgtgttcccagcttctactaggaaaccttatctctgggctccggtgacaccacctcctccctttgttcctccaacttacggtggaggcagcttccctctgctgctaatttccagtttcttcactgactcccactgggcccctcagctcctccttccctacttaaccatctccatctccaggtgttcatgtccccctgtgtttttgtcattgttgttgttgtttatttatttatttattacagacagtttcgttcagttacccaggttggagtgcagtggtgcaatcatagctcactgcagcttctaactgctaggttcaagtgatcctcctgcctcagccttctgagtagctgggactataggcacaggccaccacacccaggtatttctatttattttatttatttatttattcattttgtagagacaggatttcac[131 bp omitted]tgcgggacatgccatgcagagaatgaaaggtgggtgctgtgtgaacgtgggtacaaggaagttaggctttcactggggtggcacaatggcagctctgaggcaaaggcatcagagcaaaagagaaggaaaagagggagcctgccctgcaaagatctgggagaaccgtgctcccagaagaggaatggctatcacaaagacccaaggcaggaaagagctgggagtgcctgaggaacagggagaaggttgagcaaaaagagcagcaacatggggcaaaaagagcaggatcatggggagatgatacgaggatggagaagttgctgtggtcacaggagccatgggcaggagtttgtgcaaccagtttgtccattacccgatgcacacagcaaatcaagacagccagttgcagctgagaaagaggattagttgtagggtcaacaaataacaacatgggagagaagctcaaattcatctccctcaggaatctggagcaaggattttttttttttttttttttttttgagatggagtctcactctgtcgccaaggctggagtgcagtggcgccatctcagctcactgcaagctccgcttcctgggttcacgccattctcctgcctcagcctcccgagcagctgggaccacaggcgcctgccaccacgcccggctaatttttttgtatctttagtagagacggggtttcaccgtgttagccaggatggtctccatctcctgacattgtgatctgcccgtctcggcctcccaaagtgctgggatcacaggcgtgagccaccacgtggggcaaggatttttaaggatttgggggtgagacaaagtgtggatatcattgttggaagactgccgggtgaagtttagggacatggagaggaagaagcagtattctcatactactggcagtcctctgtgggggtcttcacattggttgctggaatttgggggtctgataaacaactcaagtgatcttttttaaaaaagccttaagattctaatgtcagagatcctgcctgtgggaacaatggagatgcaagtcaattaaatgatcttatgaccctaatgtcagacatcctatctataggccaggcacagtggctcacccctgtaatcccagcactttgggaggccgaggcaggtggatcacctgaggtcaggagtttgagaccagcctggacaacatggtgaaaccccgtctctactaaaaatacaaaaattagctgggcgtggtggcagatgcctgtaatgtcagctactcagaaggctgaggcaggagaatcgcttgaacccgggaacgagaggttgtagtgagctgacatcatgccactgcgctccagcctaggcaacaagagcaaaactctgtcagaaagaaaggagaggagaggagaggagaggagaggagaggagaggagaggagaggagaggaaaggaagagaaagaaagaaatcctatctataggaacaatgggggtctagtaccacctgacttttagcaacaaggaagtggac[139 bp omitted]gtgaaaccccgtctctactaaaaatacaaaaattagccaggcgtggtggtgggcacctgtaatcccagctactcgggaggctgaggcaggaggatcacttgtacctgggagttggaggttgcagtaagcggagattgcactactgcacttcagcctgggtgacagagtgagactcaaaaaaaaaaaaaaagacagacaggcatggtcggcttgttaacatgcagactgctgggtcccccagagattctggttcagtagatctagaacaacagagaatttgaatttctgacaaattgtcatgtgatgctaatgctgctggcagaggtcacactttgaaaaccactggtctagaaaaacaccttttttttttttgagacagggtcttgttgtctcacccacgctgcagtgcagtggtgcagtcacggctcactgtagcctcaatctcccgggctcaagtgatcatcctgcttcacccttctgagtagctgggactacagggtgcaccatcccacctggctaattttttaaagattttttttttaatatgtggggtctcactaagttgcccaggctggtgtcaaattcccagactcaagcgatcctcctgtctgagactcccaaagtgctaggatcacagctgtgagccactgtgtccagccacaagtgaaagtaagttaataaaatatgtcacttgaatttaattattttgctaataattaatagatatgctgggcatggtggctcacatctgtaatccctgcactttgggatgccgagccgggtggatcacctgaggctgggagtttgagaccagcctgaccaacatggagaaacctcgtctctactaaaaatacagaaaattagccgggcgtggtggcacatgcctgtaatcccagctattcgggaggctgaggcagaagaatcgcttgaacccaggaggcggaggttgcggtgagccgagattgtgccattgcactccagcctgggcaacaagagtgaaactctgtctcaaaataataataataacaataataaatagataatatttatataaacatatccaaaatactatttcaacatgttatcaatattttataaatgactgagctacttttttttttttctttttatttgagaccgagtttctctgtagcccaggctggagtgcagtggcatgatctcagctcactgcaacctctgcctcccgggttcaagttattctcctgcctcagcctcctgagtagctgggattacaggtacatgccatcacacccagctaatttttgtattttcagtagagtcagggtttcaccatgttggccaggctagtctcgaactcctgacctcaaacgatccacccgctttggcctcccaaagtgctaggatcacaggcatgagccgccccacccggcttacattcttttttcctattaagtcttcgaaatccctgtgtatattttatatttgcaacacatcacaattaggacttgtcttcaatagccacatgtgtgactagtggctaccatactggacagcacaggacaggcctggaatggtggccactgttgcggggatagtgagttgaaggtggagacttgcctcttgaatttagcaacgaggatgagctttggcaataaaaagtttcatttttgtgaaatggagagagagagagtatatgaacacttccttcctgaagtttgggtgtggttttaacaccaatagagagatctggctaacaaaactcaaaaccaacaccagatattagcagcacaaaaaaagacaaccacatattatgtcccttctgataggagatcttaatattatccctgaagtatacttaaccccaaactgaatgtgtatctgactcagcctctagatctaccagtttgcaagacatacagaggatggcagaacatattaaaggacaccaagaggggaaaccagtcaaatcagactgagaagagattatttataggtggatagtgtcaaaaagaaaggaaaaaattaaaatttgtaaaaaacaaaaaaaaaaatcacactttgggaggccgaggcaggaggatcgcttgagctgaagagtttgagaccagcctgggcaacacagtgagaccctgtctctattaaaaaaaaaaaaagtataaaattttggccaggtgcggtggctcacacctgtaatcctagcactttgggaggtcaaggccagagaatcacctgaggtcaggagttcgagaccagcctggccaacatggtgaaaccctggtgcagtggcccatgcctgtaatcccagctactcaggaggctgaggcaggggaatcgcttgaacctgggaggtggaggttgcagtgagttgagatcgtgctattgcactccagcctgggtgacaaaagagagattccatcttaaaaaaaaaaaaaagtataaaattaaaaaattagactgagatgaatgagagggagagggaacagttataaaatagaagacttaaagaggtaacaaacaaatacaatgtacaatgcaggcaccctggtcggattctaatttgaacaagccaacagtttaaagacatttctatgacatttagggaaatttggagacaggatgaatgttaagacactactaaggatttgttggttttttaggtgcgataaaaatgttatagtaatgtttttttaagaaccttatattttagagatacataatggatgaaatcatgtgatgtctgggatttgctttaaactaactttgggggaggtggaataaataaaacaagattggccatatgttgataattgttgaagctgggtgatgggtacttagaggatcattacattattctatttctgtgtacgactgaacattaataaggctttaaaagggggactgctgtgaaaaagagaaaaaagtagggaaattgtgtgttttttccccccaggatcgaagcgcctttaacaggctccacagctgacaaggacgttgggatgcaagagagtgagaaggcgccagggtggctgcagggcacattcaatagtcggtctagctcttgctcccgcggctgccttctctgcagctctggaggctgcagcttctggtcctggaccgggacttaggtccacacccacgtgctgacgtcgggcaggctcagcggcctcccgcgcctgcgcagcaccgcccttttcgggcgcggcgcccagtccctacaccccacaatcccccgcgccgttccggaggcgcgctaggagtgggtgtggcctctgcctccacattggaacaaggtgaggcagagggtgtcgcgtggtcttctgggaaatgtagttcgtctgccaggccggaaccaccgctcaaccggctcgcgagactatgcaccccacaatgcgccgcgcgcgcagcggctaagcgatgcgttgctgcctccacgtggtggctgagtgatcatgctccggtttgggaatggggcccagaagggtagggttaggggcggggacggtgctggggatgctgagggtcgccctggaaacctctgggaagattttccagagggtaagtcccctgaacctggcccacgaaagggtagtagtaatgaagaaattggaggtggggcccgctatgaggaccgaatgacagagcagcacctgttggctgcatatgataatcaggctactgttacacctaagactcacacagtaggcacttcctaggccacttaccgctccctgcgcttcaggtatcttagcccattcaatcctcccagccaccattcgagatattatcagccctcctttctaggagtgaagctgaagcccagaaacgcgaatcacttgctcaaagttattcaacatgtcagtggcagagctgggatttgaactaggctgtcgggctaccaagtctgggctcttcttcataggaatatctcatcaccctattcagttatcctaaaattgtaattagcacatgaatcaagtcaagatggtcattaacatgtgaatctctttgagtcgctgattaccagcgcttgttcctgcccaaatttgtgacttagacctgcttcaggacaaagttgacaatcaacatagatttatagttagcacatgaatcagcacaggtttctgttcacagggatcagatttctgattagcacttgaatcagcagtggtttgtgtcaacagctggagtctttaggttcctgatttgcacagggatctccatccagggattattttcttgcctaaataggcctgttcctttatgtccaggtgaccttctcttcaaatgttgtcccagctgggtgcagtggctcacgcctgtaatcccaacactttgggaggctgaggcgggaagattgcttgggtctgggagtttgagaccaacctgggcaacatagcgagaccccgtgtctccatgaaaaataaaacaattagcctggcatggtggcatgctcctgtagtcccagctacttgagaggctgaggtgggaggatcccttcagcccaggagtttgaggctgcagggagctatgatcatgccactgcatggcagcctcagcgacaaagcaagaccatttctcttaaagaaaaaaaaaaaagggcgggcacagtggttcatgcctgtaatcccagcactgtaatcccaggttgaggtgggcggatcaactgaggtcaggagttcgagaccagtctggccaaca[138 bp omitted]tggtgaaaccccatctctactaaaaatacaaaaattagcagggcatggtggcacgtgcctgtaatcccagctactcgggaggctgaggcagaagaatcgcttgaatccgggtggcggaggttgtagtgagccaagatcatgccactgcactccagcctgggtgacagagcgagactccgtctcaaaataaaaatcagccaagcgtggtggtgcatgcctgtaatcccagctactcaggaggctgaggcaggagaatagcttgaacccaagaggtggaggttgcagtgagccgagatcatgccactgcactccagcctgggcgacagagcaggactctgtctttaaaaaaaaaagagatgggggctgggcgcagtggctcacacctgtaatcccagcactttgggaggccgaggtgggggtatcacctgaggtcaggagttcaagaccagccttgccaacatggtgaaaccccatctctactaaaaatacaaaaattagccgggcatggtggcacatgcctgtaatcccagctactcgggaggctgaggcagaagaatcgcttgaatccgggcggcggaggttgtagtgagcaaagatcacgccactgcactccagcctgggtgacagagtgagactccgtctcaaaataaaaatcagccaagcgtggtggtgcatgcctgtaatcccagctactcgggaggctgaggcaggagaatagcttgaacccaggaggtggagattgcagtgagccgagatcatgccactgcactccagcctgggcgacagagcaggactctgtcttaaaaaaaaagagatgggggctgggcgcagtggctcacacctgtaatcccagcactttgggaggccgaggtggggggtatcacctgaggtcaggagttcaagaccagccttgccaacatggcgaaaccccatctctactaaaaatacaaaaattagctaggcatggtggtaggtgcctgttatcccagctacttgggaggctgaggcaggagaatcacttgaaccaaggaggcagaggttgcagtgagccaagattatgccactgcactacaacctgggcaacaaagtaagactctgtctaaaaaaataaataaataaatagg[140 bp omitted]gcatggtggcagacgcctctagtcccagctactcgggaggctgaggcaggagaatggcgtgaacccgggaggtggagcttgcggtgagccaagatcacaccactgcactccagcctgggcaacagagctagactctgtctcaaaaataaataaataaataaaataataataaaatggggttatttgttttttgcttgttgcattgtttaagtcccttatagactgaattcctctttatgtctctaaatacatttgtctctttggtacacatctgcggtgctacatgccctcaacccaccaggttttagcatagctgttgtggtagacagttccgtgtgcagtgcagatagccctggttcagcccagctgttctcaaaatgtggtccctgaccaggtgtagtggctcacacctgtaatcacaacactttgggaggcctgggagggaggattgcctgaggccaagagttcaagaccagcctgggcagcatattgagaccctgtctctacaagaaattttaaaaattagctggatatggcgatgcatgcctgtagtctcagttactctggagcctgaggtgggaggattgcttgagcccaggaatttgaggttgcagtcaattatgattgcaccaatgtactgggtgacaaagcaagaccctgtctcaaaaaaaaaagtatggtctttgaaaagtcacattagcatcacctgggtactcgttaaaaatgcaaatgtttgggtcccacctcagacccactgaaccagaaactctgaggttgggacctggagatctatggtgcccccgggtgatcctggtgggctgcactgcaaggacacctggcctggctcctgcaaggcaaggcatccctctctgcttttctttctttctttctttcttttaaagacagagtctcactctgtcacccaggctggagtgcaatggctggatctcagatcactacaatctccacctcccgggttcaagcaattctcttgcctcagcctcccgagtagctgggattacgggcgtccgccaccacacccggctaatttttgtatttttagtagagacggggtttctccatgttggccaggctggtctccaacgcctgatctcaaaagatccgcccgccttggcctcccaacgagccgggattacaggcgtgagccaccgcccccggctgtcagtgtgtcttgaggtctttccctaatcccagatggcacaagttttccctcttgcaggcagagaaaggagccttgggaaggagcccctctggcctgaaagatcaagcctattgctgggcatggccaggtaaggaaactccaaccgtggaaaggacattccagggaggtggtgctgagataaggggggcagaaagagacaggtttggggggccagtggctctggaatgaagcgctacactcaaggctaggaatagttactgaatgcacatacacacataccattctcacagcccaggtgctgcgtcttagagcgtgtgagtgtgtatgtgtgtgtctgtgtgtgcgcgcgcacgcacgtctctatctctgtttctgtctttctctgacttgtccttatctcttgtctctccatcactctctgtgtctcgctgtctctgtgcatttccatgtctcgaatatgtgtgtgtttcaatctgtctctctgcctctttccattttctcctctctatccatcaatctaagcctgcccatctttttgtctgcctttctgtatctccgttcttctctgtctctctgtctcagtctctctgtatccagggattctctttcccagcagcgccagtgcgactccatgggaggtggggccggggcgcgtctttgagagaaggggcgggtgcctacgcctttaagcgcgggtgcgcgcggagcctgcgcctttaagcgccggtgcgcgcgctgccctgggttgccggcgaggaggccgcgggagcgcctggacccggcccgcccagcccggcccccgcccggcccccgcctcggccccggcgggggaggggtctctgagcgcggcccctcccccctgcgcccccgcctgcgctgcggtgcccccatcccgcgtgtcccagtctgtctgaccgtccctccgctcccaggcctcgccccacccggccctggggctgcccggtcgcccccctccccaccgcagccggtcccctccctcccagtcagcctccgccgcagcccaggaagccagccgggacgccgccgccccggaccccgcgccctaacctccacctcgggggcctgcacccccagattgaatcgggaattccggaaacccgagcctggaaccctgatctgggaccagcaccccgagatccggccgtggaaccccaagatctggagcctgaaccccagtatatggggctggaatctcaacatcggtcactgggacctcaatatttggagccggaaccccacaatttggaacacagaccccaatatttggagcagaaccccaagatttgacatctaaaacctcaagcctggagctgaactctgaattctgggcctgggaccttgaaatctgggactggatttccagtactgtaccctggaacccactcttggggacctgaaccctgggattcaggcctcaaattccaagatctggactgtgggattccaaggggcctgaacccgagtttgggcctgaagtccttgctgcagacctgagtgcttaaatctggggcttgagacctcccaatcttgactcagcaccccaatatctgaatgcagaaccccgggatcggatctcagactctaaaccccaccgtttggctgcttagcatcccaagactggacctgggagaccctgaccctgaacaacccaaactggacccgtaaaactggaccctagaggcccaatatttaggggtctggaaccccgagtattaaggtctggagactccgttgccacagatttgagccgagtcaggacacagtccctctacagaagccttggggacaggaaaagcatgaccagatgctccctccagagccctgacctctgactcccctggagctaggactctgctccctggggctgcttctagctcaggtaaggctgctgaaacctcaaggtggggacgggctgggaggagcattgtggctgcgggttacggtaccaggtaccctttgacactcttggggtttctccagaaaaaaagacattcccccatgggtctgccttcagctcctgctctgctccaaacactctctggacactggccatccttgcccctctctgaccttccctgcctcagttgatgggacctccaggtctctgacccctgcaacccttacagcctttcgctgtctatccggtccgaccgtctccgccacctctcttgtccaccactcctctctctgggctcctttctccacctgtcctctcaatggccatctctgttccctttttctctctctgatcatctttgtgacacccctgtccacaggtcctctctccagtcgcctctgcctgctgcttctcagtgaccatcgctgacatctgtgtccactgtgcctctctctaatcatcattcaccagctctcttgctccttctccacccctgaatctaagcctaggtctgtgaccgtccccatccatctttgacattgctgtccaccactcttctctccagcagcctctgtccatctctcctctctagcttcctctggccacctttccctttctctggccatctctcccactgctcttgccctcctcccacccctgaccctaactcccagtctgcaactgtctgaccatctctggccacctctcctctctctctcactcactgatgccctctgatcatctctggccacctcttctctctctctcactcattgatgccctcttgatcatctctggccacctcttctctctttctcactcactgatgccctcttgatcatctctgcccacctcttttctctcgctcgctgatgccctctgatcatctctggccacctcttctctctctctcactcactgatgccctctgataatctctggccacctctcctctctcacttgctgatgccctctgatcatctcgaacatctctgctgcctttcctctctccgatgacctctccccgcaccatcctcctgagcagctgtcctgggctcccactgactctgccatgtctgtccttttcctcctctctgaccaccttgctggctttgggccgtttctgaccacgtgtctctgacatggtcatctcccccagatctgagcccaacccatgccctcccttctctttgtccactgctcatcttcctgaccatctgtaaccccttctcttctctggtcatatctgaccacttctgatcattgttgccaccctggctgccccgtctccccatggccagcttttaccatctctgaccacgtctaaagccctctggttttcctgccactcacccagaccagctgtcatttctctgaccatttctttacttttttcttttggagagacagagtcacgctctgttgcccaggctggagtgtggtggcgcaatcatagctcactgcagcctcaaattcttgggctcaaattgatcctcccacctcagtgtcccatgtagctaggaccacaggtgggcgccaccatgcctagctaatttttaaaaatttttgtataatagatacacggtctcactttgttgcccaggctggtcttgaactcctggcctcaagccatcctcctgcctcagcctccccaaatgctgggattacatgtgtgagccaccgcgcctggccttcctctggcttttggtcacatctgacggtctttgaccagcccttctgccctcagcccactgtgaccttctctcctggtctcagaccacccccagcccctgcagaacccctcttctgccctcacgcctcccctcttctccgcaggacacccctgcccgcgatggccatcctcccgttgctcctgtgcctgctgccgctggcccctgcctcatccccaccccagtcagccacacccagcccatgtccccgccgctgccgctgccagacacagtcgctgcccctaagcgtgctgtgcccaggggcaggcctcctgttcgtgccaccctcgctggaccgccgggcagccgagctgcggctggcagacaacttcatcgcctccgtgcgccgccgcgacctggccaacatgacaggcctgctgcatctgagcctgtcgcggaacaccatccgccacgtggctgccggcgccttcgccgacctgcgggccctgcgtgccctgcacctggatggcaaccggctgacctcactgggcgagggccagctgcgcggcctggtcaacttgcgccacctcatcctcagcaacaaccagctggcagcgctggcggccggcgccctggatgattgtgccgagacactggaggacctcgacctctcctacaacaacctcgagcagctgccctgggaggccctgggccgcctgggcaacgtcaacacgttgggcctcgaccacaacctgctggcttctgtgcccgccggcgctttttcccgcctgcacaagctggcccggctggacatgacctccaaccgcctgaccacaatcccacccgacccactcttctcccgcctgcccctgctcgccaggccccggggctcgcccgcctctgccctggtgctggcctttggcgggaaccccctgcactgcaactgcgagctggtgtggctgcgtcgcctggcgcgggaggacgacctcgaggcctgcgcgtccccacctgctctgggcggccgctacttctgggcggtgggcgaggaggagtttgtctgcgagccgcccgtggtgactcaccgctcaccacctctggctgtgcccgcaggtcggccggctgccctgcgctgccgggcagtgggggacccagagccccgtgtgcgttgggtgtcaccccagggccggctgctaggcaactcaagccgtgcccgcgccttccccaatgggacgctggagctgctggtcaccgagccgggtgatggtggcatcttcacctgcattgcggccaatgcagctggcgaggccacagctgctgtggagctgactgtgggtcccccaccacctcctcagctagccaacagcaccagctgtgaccccccgcgggacggggatcctgatgctctcaccccaccctccgctgcctctgcttctgccaaggtggccgacactgggccccctaccgaccgtggcgtccaggtgactgagcacggggccacagctgctcttgtccagtggccggatcagcggcctatcccgggcatccgcatgtaccagatccagtacaacagctcggctgatgacatcctcgtctacaggtgcagggtccaggcactggggtagcttgggtgggggagtgaggcaaggggagggttgagggtacacctactaataccctacaccgaagcacaactgataagtgatgctggaaggttccaaaagaaatcagagagcaaaagtaaaagaaatcaggcagcaaggataacaagactctggcagaaagggtcaatgaaatctgacagcagtgataaaaagaagtcagacaagaaggacgaagtaaatgagacagcaaatgttaaaatatatcaggctacagggctaaaaaagatcaagcaataaggataaacgaaatcaggctgcatgagtaaaaagaaattaggcagcaagaataaatagtagtagcaaacataaaaaggaaaccaggcagcgggaggagaaagtaatcagggcagaagaataaaatgttaatgggcaagggtgggtggggaagataaggggataaaaataaatttaagttgtaaagataaagagagaaacaccaggttttccagatgacaggactagatactagctgggctgcaggaagaaaaggagatcaaacaggaaagcacagggagcccagaaacaatgaaataagcagctctgttagaaaaagaaatcagaccagaggttagaaggaaattgcagggaggaggttcgatagagactgggcttcggtgtgtgtggtgtgaactattccatgtttcaagttctaatatagtgacatccagatttttttttttttgagacagggtctcactttgtcgcccaggctggagtgcagtggtgcaatctcggctcactacaacctccacttcccgggttcaagcgattcttgtgcctcagcctctcgagtagctgggattacagacgtgcaccagcacgcccagctaatgtttgcattttatttttagtggagacggggttttgc[135 bp omitted]agtctcactctgttgcccaggctggagtgcagtggcacaatcttgactcactgcaagctccgcctcccaggttcatgccattctcctgcctcagcctcccgagtagctgggactacaggcgcccgtcaccatgcccggctaattttttgtatttctagtagagatggggtttcaccatgttagccaggatggtctcgatctcctgacatcgtgatccacccgcctcggcctcccaaagtgctaggattacaggcctgagccaccgcgcccgacagattttttattttctaaatcaaatcaaacctagttcaagttccttttgccaggtaaacagaaatatccagtttgccacacttgtgggggattctcttctctctcctgttgttgcaaacacagaacctggggtttacacactccaagaggtggctcagtccaacttgttcccccaagctggagagcactcagcacatctgcagtgaccgcatgtggtcagcagtggtggctgctgacctaggtgctgttgacacctcttaccaaagtccaaccttgcatggatggactgcggctgtgggtgagtccctgtcctcacggccaggctgggccaagggtgcagccccaaggctgactgtaaagactggacctccccagggttgaggactgttccttggggacctagtagtacctggatgtcctttccctcccttggggccaacacctcaagaaaaggccacttgatttccatttcagtcctggcaacccactgagctcattctactccctttctcagacatgactcggaagattgcacggaagtcctgcccctgaaaatcacacaagtcggccaggcgcggtggcttaacccctataatcccagcactttgggaggccgaggcaggtggatcaccaggtcaggagtttgagaccatcctggctaacacggtgaaacctcgtctctactaaaaatacaaaaaattagctgagtgtggtggcacgcgcctgtagtcccagctactcaggaggctgaggcaggagaattgcttgaacctgggaggcggaggttgcagtgagccgaggctgtgccactgcactccagcctgggtgacagagtgagactccgtctcaaaaaaaaaaaaaaaaagtcacacaagtcctggccaccttgccaggtggggaatgggatgaatgctgtcctagacagtcaccctgccccaggcggccacggagttccctgtacctctctcattagaatagcctaggaataaaacaggtgataagtcaactctccaacagggtgcccaactacaaaagaaactatagtgaaattgggtggtaaggattaaaaggaaacaagaaagaaaaagataaatagaaaccagccaacagagataaaagagaagcaggtgacagagccggaaagaaataaggcaacagggagaaaaagaaagcagtagtgacggaggcacattagtttaatgaaaagggaatcagacgacaggactcattggaaaacaggctatcaatacagtcatcataataaggcaatagggctagggggacatttattggcaggttacaaggaaatcgggcaacaggggtacagggagatcaggtggtttgattggagagaatcctagctgtacactagaggaaaatcaggcagctggaaaagggaaatttggcataggctgcaggaaataggggaaccagagggaaattggcaagcgtctggaggagactgggaggtaaaatgtgggggaaattggatgggggtggctagaagacaaaaggattaaattagatggaaattggacagggttagagcagaattgggtggtgaactggagagatgactggcagtgggaccagagtgaaatcaggcagaggattggggcaaaattgggcagggaggctagagcggagctgggctgcaggctggagggaaattgagtgggcagtgcaaaagggaaattgggcagttgggtataaaatgaaaccggcaaggtgtggtggctcacgcctgtaatcccaacacttaaggaggccaaggcaggaggctggactgccttgaggccaggagtttgagaccagcctgggcaatatagcaagagcctgtctctacaaaaaatttaaaaattagctgggcatggtagtgcacacctgtagttcctgctactcaggaggctgaggccggaggatggcttgagtccaggagtcagaggctgcagtgagctgtgatcatgccactgcactccagcttgggcaacagagcaagaccctgtctataagaaaacagaaagaaagaaagaaaagaaacaggatggattggaagaactcacgtggtgagctgttagagaaattgggtggtgggactagagtgaaaatgggcagcaggctatgaggacgtgtgagagggtgggctagagtgaaattggccaacagactggaggggtatcagtcaggtggctgaatgggatgtcagaccaaagggaattgggatgttggtgagagggagctcattgggtagaatgaaatgaaggagtggactggtgggaagtctagccccgcagggagtttggtgggggaagcacaggttgggggctgggcagcctgagacctgacccccacctgcctgccctgcaggatgatcccggcggagagccgctcgttcctgctgacggacctggcgtcaggccggacctacgatctgtgcgtgctcgccgtgtatgaggacagcgccacggggctcacggccacgcggcctgtgggctgcgcccgcttctccaccgaacctgcgctgcggccatgcggggcgccgcacgctcccttcctgggcggcacgatgatcatcgcgctgggcggcgtcatcgtagcctcggtactggtcttcatcttcgtgctgctaatgcgctacaaggtgcacggcggccagccccccggcaaggccaagattcccgcgcctgttagcagcgtttgctcccagaccaacggcgccctgggccccacgcccacgcccgccccgcccgccccggagcccgcggcgctcagggcccacaccgtggtccagctggactgcgagccctgggggcccggccacgaacctgtgggaccctagccaggcgcccccccctctaagggtcctctggccccacggacagcaggacccggacaccctgtgggacctggcctcaaactcaccaaatcgctcatggtttttaaaactctgatggggagggtgtcggggacaccggggcaaaacaagaaagtcctatttttccaagcttgggcgaagacccttgccctcgtctctgtctatgggggttgggggacggagcaggggtctggagctggggaatgcctcctttggggagacaccccctccccgcccagttcagtctgaggaccccggaggaggctgaggatggcgatccattcagacaatagatgttccctgcgtgtcggctctgagcatgccctgggttgggggatgctgtggtgatccagatagccctgagccctgcccgcaggggcctaaagtcaaatgggagacagacacatccccagacagtgatagcacagagtgaccagggatgtggggatgagggaagcctgggggattgtgacagtccagaagaggtacccttgctcagccccaggtgtggtcagggagggcttcctggaggaggacacatgtgatctgagaatgacatatgaaggagataactgggcaaagagcagaaggaaagctctttcaggcagagggcacagcacaagcaaggtggtggtgtgccctgggcactgggggtgctatggtagaggtgaggcaggagggttgagcagggtctaggacctccaggctgaggagctcagactctggcctgatgataccagggagccatggagggttgtatgcaagggaggaatggggtcagtttggggcttcaggaagatccttctagtgctatgagtagggtggacccaaggggaagactgaagctgggagccccaggggaagctggggcagggacctgggtgggtgaggacgaagttggaccagctgggctagggaacaagaaaagggagtgggttgacagagacactcgggaaactgtgggaagctgaggcggtgggttatggagctgcggggccatggggtggggcaggaagatggtggggactgccctcatataggaccagggaggaggagcaggtttgggaaagatgatatggccagtggggaacttggtaggtgtagggggccctgaggatgtccaggatgtggcattcaggagggtgcaggacccctggtctgaggctgaagctggaaatagaaatgagggctttgtcagcagagatgggaactgacgctgctggggttaagacggcttcttgtgggggatgattccaagtccccactatgggacattttttcttttttcttttttttttttacagatggggtctcactatattgcccaggctgatcccaaactggcctcaagtgatcctcccgtctcagcctcctgaattgctgggattacaggcatgagccactgcccctggctagggactttccatatttaagggtgacgcaaagaaaaacctaaccaagactaaacaggaccagcaggcagagggacagggggaagaagaccaagcaattcagacccaagaaactcttgtgttcaatgatataaataaaggctgcggtgaccccccagagagcagtgttagggggtcagttggggcagatggcagattcagctgatttgagaggagggggtaagaaaatgtagctagagggtgcagcccctgtcaacctgtgggcctggagtcccatgtctttgcagggtgggtccttactctgtcttgggcagccctaggccccatgagacaccaagcctggaggtttgcagaaccaaaccccggtctaggagatgttgagcctccttggagatccaggaacggggttggcagtaagaggaatagcaccccctgaactcagggcttcactaatgatgtccccagaggcaggagagtggagggaagctgggtcctgtcacctggagggacactggtgtgagggcatggtaaagagagcccaagactgaactggcccttttcatgacctggggcacatgattgtgacctcgtgggatgacatatcctagattctgccacagcttttctggggggtctaggccttgaacatgttatgccatgagtcatgggaccagcctgagtcctgggggacctcgtctgaccacaccctactccccaagtccccagcagtatcatgagatccttcttgttgtttgttagccttggacagctgaagtcaggtgacgtcatcaagaagagtgagggcatgagtcctggggaaaggggcctaggagcaggggcatagtgtttcgagactgtggtcccagctactcgagaggctaaggtgggaggattgcttgagcccaggagttcgaggctgcagtgagctaggattgcgccactgcactgagcccaggagttcgaggctgcagtgagctaggattgcgccactgcactccagcctgggccacagaacgacaccctgtctccaaaaaaacagaaaaggagcctaggaagtgaggatgctgggggcctagtgctggctacaattaccagttgctcccatgagggggagccagagggcactgttcgtgtgtgtgtgtgtgtgtgtgtgtgtgtgtgtgtgtgtgtgtcgaagtctcttgtcgcctaggctggagtgcaatggcgcgatctccgctcactgcaacccccgcctcctgggttgaagcgattctcctgcct[450 bp omitted]ccacacccagctaatttttgtatttttgtagagatgggggtctcactgtgttcccatactggtcttgagctcctgacctcaagtggtcctcccaccttggcctcccacagtgctgggattacagatctgaccgtagatgttatataatcacaccagcaagtgtaagcatctgcagtgaccaaggggcgccatgcaggagacacatacagaagtgcgcgaccctgtaaccaggggccctgacccaacaagagagattgaggaaggcttcctggaggaggggaggcctggcggagacctgaaggatgcgcaggttggagttaaccatgaaaggggtgggaagggtattccgtgcaaatggaagagcctgtgctgagggaagcatgagtgaaagagctgaggccagggggctgaagtaggggagggaagggaagagagtgaccttgggttgaggctggaaagcaggaagggagccgatgacgcaggaccccgtaggctgctgggaggagtgtggattgtcctctaagtggcatgagaagccattgaagggttttttggttttttttttttttgagacggagtctcgctgtcgcccaggctagagtgcagtggcacaatcttggctcactgcaacctccgctacccgggttcaagtgattcttctgcctcagcttcccgagtagctgagattacaggtgccctgccacgacgcccagctaatttttgtatttttagtagagacttcttcaccatgttggccaggctggtctcgaactcctgacctcatgatctacctgcctcggcctcttaaagtgttgggattacaggcggcatgagccaccccgcctggcccattgaagggttttgaggtctaatgagagtagcagtccctgatctcaaggaagctctgtggggaggaggatactgcaatagtccaagcagaagggtgatccggaccaagttggggcctgaagtggttgaagagagatttgagacgaccttactagaggcctctgccccccacccagcagacagtgtgccctactgtacagctacccagttctgcagcaagattgcagagatgggaagaagagttgtaagacactgggctctgatatccacagctccaccccttagatgggggagggacttctgtgtagcatgggaatgacggaccttttccaggctcaagtagcaggcagacagtggatggaggctgagaggcagtgggtggtcagggggaatgtggacacaggaaatgcagggctggaagggggacacacacttggtagtagcttattacaaatatggaagcaggaaggatgggaggagggcagactggtccctctagcatgggtcccccatgttcccccacagcatgcctggaccacccccacccgcctgcagaaacacacaatcacatgtgtctaggatttaaagttaaaattttgcttgtcagctaggcacagtggctcatgcctgtaatcccagtgctttgagaggccaccctcagggaggattgcttgagcccaggagttcaagaccagcctgttttcaactccgtggaccctgtgaggcacacttcactctccccagccctctggataaaacagtagttccttaggaactttaacttcccccaaaatgctgtggcctcccaggcaacatagccataccccatctctacaaataataataataattagcttgtccaactgcctagctaagtccatcaatttcctgagctcagggagtacaactacttctactgtcaattcctcatcaattcctcatctgcttttggccccacacattttttagaccaaagctccggctgctggagcattatcttgaagtgactgtagacccaataccaggattctgccctgtctgtgtactgccagatccaacccatgtgtcttggggtggctaaatctgacaaaggccctgagtgtctggggacacctgtgatctcctgcaaggctgaggctaatgccacgcttttgcagctctttgcatgggcacatatgtgagagaatcagataaaaggtgttcccaaaaaggatgtttgtgttcagggtggaacctgacgcctgcctcctgcctttgggtcctccctgatggctgtgccctctcatacctcgcaaaagcaaagataggtatcagtgctgcctgtcgtcctgacctgtgcggagtgacgttgggaacattgtggtgaccaacacagccctagcccttgccctcagagttccagttcaaggctgggagcagtggctcatgcctgtaatcccaacactttgggaggccgaggcaggtgggtcacttgaggtcaggagttcgcaaccagcctggccgacatggtgaaaccccaactctactaaaaatacaaaaattatccgggtgtgatggcaggcacctataatcccagctacctgggaggctgaggcaggagaatcacttgaacccgggaggcagaggttgcagtgagccaagattgggccactgtagtctagcctgggcaacagagcgagactccgtcccaaaacaaaccaacaaaaaagagttctatttccagtggaggaaatagataatcacaaaacaatggcatcccagagtggtcggggatggggaaagaacaggcaagaatgatcagggcttttgcagaagcccaggggactcccagagccagagggttctacacttgatcttagccaaaaggccaagaagcaatctgaagtttctaactgggcctgggatgggaggtggggagacagtccaagatttcctgaggcagggccagctttatggcagtgtgactgtggggttgcaccatgccccaaacttagaagtaccctatgcttgctttaatgccctagtgtcactatcttgaaattaataatttttgaacaagggccccacattttgattttgcactgcgccctgcaaattatgtagccagtcctgcccggaggagcgaacacttgagggatttacagagagagccgaggcagagagggtcttcccaggagagagagcattgggtacaaaagccaagagagggccaggcgcagtggctcatgcctgtaatcccagcactttgggaggctgaagcgggcgaatcacctgaggtcaggagttcaaaaccagcctggcaaacatggcgaaaacccgtctctactaaaaatacaaagaattacctggacgtggtgtcaggaacctgtaatcccagctacttgggaggctgaggcaggagaatcgcttgaacttggaaggcagaggttgcagtgagcccagatcctgccaccgcacactagcctgggtgacagagtgagattccgtctcaaaaaaaaaaaaaaagaaaaaagagaggactgcacactcaaagaatgagccagagttcagtgtggctggcgcaccatgggagaagggcgcactgtggggccatggagggtggagggtgataaggtggagggacagggtcaggtttgcactttagaaaaatccatctggcagctgggcgcagtaactcacacctgtaatcccagcactttgggaggccaagacgggcggatcacctgaggtcgggagttcgagaccagcctgaccaacatggagaaaccctgtctctactaaaaacacaaaattagctgggcgtggtggcacatacctgtaatcccagctactcgggaggctgaggcaggagaatcgcttgaacccaggaggcggaggttgcggtgagccaagattgcaccattgcactccaacctgggcaacaagaatgaaactccatctcaaaaaaaaaaaaaaaaagaaagaaagaaagatccatctagctaccatggggagggtggatgggggcacaaggccagggagaagatgggggactcagctgcctgtggaaggagctgggagtgtgggtgattctgaggaggagaggccagcatgggcacgtttaccagaaccttgggtaatagacatcccagtgcaggagacgagctgggagaccccaaaaccacgggatgaacccagagcctcattttcacttgcaaatgtttaccgtgggtggcgggggatgcagaagggtaggttacagaatgtcactcactggtaagtacttgaaaatctttttatatgaaaactcgcatggatagactgatggaggtgaatgcaaaattggcaagaatttcgagtataaaatgtgagatttcaaaggactttcttctggatatgttctggcttcaactccatagacccccggggtgcacttcactctccccagccctctgggtaaaacagcagttccttgggaacttcctcttcagcttcccctaaatgctgtggcctcggggagctgggaatgagccccttcctgcctctgtactcacattcagggacatcgacccctaacacctgtttttcttctctgttggcaaccttcatatttcttttcttttctttctttttttttttttttttttttgagatgaagtcttgctgtgttgtccaggctggattgcaatggcgagatctcggctcaccacaacctccgcctccctggttcaagtgattctcatgcctcagcctcccgagtaggtgggactgcagacgtgtgccaccaagcctggctaatttttgtatttttagtagagacggggtttcaccatgctggccaggctggtctcaaactcctgaccttgtgatcctcccgcctcagcctcccaaagtgttgcaattacaggcctgagccacctcaccaggctacaacctccatatttccatcctcaaccccagcatctctcctaagtccagacctggcttacctcagtttcccggacccctcttcctggacatcccctggggcccctcacacccactggatcccacacccacctcggcttcttctcggacctatgcctccttctaggtcctgtctgggagagcaacccccatgcagcctcctgaatgtcccccacctccccttcctccctgccccggccccatcctgggctagttctggcctcacccatctgggtccttgcactgggctcctggcctcagtctcttctctggtccaggatcttcctaaagccaaaccctcctctgtataggcacccccatggctccccagggttcctgggacagtctgagctcctcagcctctagcatcccagcccttcccacgccatccctcttccccagctctgtttctagcacatatgtttgttccccacctcaggcaggaaggaaacactaaccacatcctctgcttgtgatgaaggaggatcttaagcaagtgacagatgaagctattgaaggaaagtgggttccagctgggcgtggtggctcatgcctgtaatccctgcactttgggaggccgagttggatagatcacttgaggccaggagttcgagaccagcctggccaacatggtgaaaccctgtctctactaaaaatacaaaaattacttgggcgtggtggcacgtgcctgtggttccagctaccccggaggctgaggcaggagaatcgcttgaacccaggaggcggaggttgtagtgagccgagatcgccccattgcactccagcctgggcaacagagtgagactctgtctcaagagaaaaaaaaagaaagaacatgggttccttcttgaatgctccccttattcctcccaccaaaggtaacgttctgggggagaaggaggcctgggtgcagctactagcatctgggggagaggcagttggtaactgtacccagggtcccttgcttctccatttctggagatccatccttgccctcctctccgagatcctcctagaaggctgtagctccattgttctcagcttctgggaagccgagaggacgttctgggaagaagaaagtgatgtataggccattgttttctcacgggaacctctgtccccaaatcctccagacctccacatccaggcacctggtgccctctcctgcctctgtctctggtcacttccacaatccaggagcccaggcgtctagcttcctccttcctcaggagttcaggtctgcagtcccctccttcctcaggcacagaagccccatctccactcccctccatcctcagaacacaggctcccggcccccttcct[137 bp omitted]cggtgaaaccctgtctctactaaaaatacaaaaaaattagccgggcctggtgacgggcgcctgtagtcccagctactccggaggctgaggcaggagaatggcctgaacccgggaggcggagcttgcagtgcgcggagattgcactactgcactccagcctgggccacagagcgagactccgtctcaaaaaataaaaataaaaaaaacttctctctcagcaggctcaggagtcctccccctccccgcactggccctgccacctcttttctaatttatctatttattttttattttttttgaggcagagtctcgctatgtcacccaggctggagtgcagtggcacaatctcagctcactgcaacctctgccaggttcaagcaattctcctgcctcagccttccaagtagctgggactacaggcacccgctaccacgccaggctaatttttttgtatttttagtagagatggggtttcaccgtcttagccaggatagtctcgatctcctgatctcgtgatccacccgcctcggcctcccaaagtgctaggattacaggcgtgagcaccgcgcctggccttacttttttatttttagagactgggcctcactctgtcacccaggccagagtccagtggcaccatctcagttcagtgcagccttgatctccctgggtcaagcaatcctcccacctcagcctcccaagtagctgggaccacaggtgtgtgccaccacacccggctgtgcccctcttgtcttaggatggtcttcaggtctcagcttctccaccttgccccttcaatcccttattctgtctgagaaacttacatccctcactctctccaaatacaaccacttcctcaatattcaaagggcttcttccgatgctgggcacggtggctcacgcctgtaatcacagcactttgggaggctgaggaggagggtggatcacctgaagtcaggagttcgagactagcctggccaacatgtgaaaccccgtctctactaaaaatacaaaaattagctgagcatggtggcacctgcctgtagtctcagctacttggaaagctgaggcaggagaattgcttgaacccaggaggcggaggttgcagtcagccaggattatgccactgcactccagcctgggcaacagagcgagattccatctcaaaaaaaaaaggtcctggcgtggtggctcacacctatattcctagcactttgggaggccgaggtgggcagatcacctgaggtcaggagttcgagaccagcctgaccaatatggagaaaccccatctctactaaaaatacaaaattagccaggcatcgtgatgcatgcctgtaattccagctactcgggaggctgaggcaggagaatcgtttgaacccgggaggcagaggttggggtgagccgagattgcaccattgcacactccagcctggtcaacaagagcgaaactccgtctaaaaaaaaaaaaaaaaaaaaaaaggctttcctggaataaattactttcttgtctgtctttggtcttttttttttttcagctttattgagatacaattcaatggatttgagtatattcagagtcatgcaacctaacaccacaagctaactgcaggatattttcatcaccctgaaaagaaaccctacacccattaacagttaatccattccacctacagccagcctaggcaaccactaatctttctgcctattctggacacttcatatgaatggaatcatcacgtgatcttttgtgactggcttctttcacttaacgttttcaaggtttatccatgtttagcatatatcagtatatcagtccttctttcttttcactgccaaataatgtttatgggcctaggggtagaattgctaaatcacgcggcagctgtgtttcattagtttgaggaactgacagtctgtttcctgaagtggctgcaccattttacattcccaccaacaatgtatgagggttccaatttctgcacatcttcaccaacacttgttattatttctctttttaattacagccattctagtgaatgtgaagtgatatctcatagttttttgtttgcttgtttgttgttgttgttgttgtttggagacagagtctcactctgtcatccaggctggagtgcagtaggcacaatcacagctcactgcaacctccacttcctgggttcaagtgattctcctgcctcagcctcccgagtagctgaggctacaggcatgcaccaccacacctggttaatttttgcatttttagtagagatgaggtttcaccatgttggccaggctggtctctaactcctgatctcaaatgatccacctaccttggcctcctaaagtactgggattacaaacgcgagccattgtgcccggcctcatagtagttttgatttacacttccctaatgattgtgtccagcagcttttcatgtgcgaactggccatttgttagtgggttttgcttcttttaaaaactgctgagccatccataaacattttcaaaatgcagggtatgtttttcagtgttaaggcaactgttttgatgtgttttcctttgctctctatcaccaaatactgtacatacaaatagtaagactgggctttgtgttgtccattgttaatcctaaatgcaacaaaacacatggagactttgaaaatccttcagaataatgctatagttaagattttgctaaagcaagtgttttttctaactccttgagctgcatattgccttgagtaatcatcatccgaattgtatcctcttcggtggcacttttgtttcttttgaattcttcccttgcccaatccttcaggtatttgcgatcagaatcatttggaacttgctgaattgtttggaaaatccttctgtagaggagaagaacttgttgccttctgatgaactgctttaacattagtgttgctggggtaagcgggaagtggccatgtctgccagcagtccgccggagcctcagctggtctttttccttctctctttctccattccttaccctatctgtccctctcccctcgtccatctcttcatctcaccataacccttttttttttttttgaaacggagttttgctcaggctggagtgcaaaatctcagctcactgcaacctccacctccccggttcaagcaattctcctgcctcactctccagagtagctggagtagctgggattacaggtgcacgccaccacgcctggctaatttttgtgtccttagtagagatggggttttaccatgttggccaggctagtctcaaactcctgacctcagatgatccacttgcctcggccttcctaaatgctgggattacaggcgtgagccactgtgcctggccttcaccgtaacttttgtgtatctttccctctcccacatttactctctatgccgatctctgtccccacctccccatagctgtctttcctttctctgtcccctcctttctccacccagcacccccatacttaggcctctgtatgatcagtggcaccaggtcaggctggagccagtactaatgggtacatttgtgtgtagacccagggtgggtgctgagggccaggcccaggcacctaggactataaatgcccctgcaatgtggttggcctcagccctgctctggcaggtgacccccgggccctgggctctgaggctgagcccttctctgaggtctcccttgtgccccgtactgcccctgcagtgggaggcctggagggaaggctggcaggaggaaccacactaaccagtctatctccctctacccccagctgtgcctcggtgccttgggtttcctacagggtgagtgccccagaaggaacacagaaagctggtgagttggtctggatttgcagcagagtgtggggtagggaggggctggttgtgctggctcaggttgggaggctgtctggcatggctctgtgacaggggattggccacagtggaacttcttgggacagggccctggccagctggacaaggggctatttgggcagactgtgtgccaggagattggcaaaactggttctgaggaggctgggcgggccttttggggacagatggtgcaaaagaagcaagtttaagctaatattgatatagctgacttcatgccatggctttgacatcaagctccccatcattctgtgaagtgtgcaccgataccccctttacagacacagcagcttaagccccaagaaaggaggtgacttgcccaagttcacttggctagaaagtggccgagtcggctgggcaaggtggctcacgcctgtaagtaatcccagcactttgggaggccaaggtgggaggatcgcgtgagcctgggagaccagcttgggcaacagattgagtctcctctctaaaacagaaaaagaaaaggaaggaagggagggagagagggagggagagaaggagggagggagagagggagagaaagtggcagagtcagaattagaatctgacgcatttagcttccaaatccaccggattattcttgactgcctcctctgggctcctggttccctcaagcccgacggacgtctgtgttttatgtttccagggctgccgcttcatcacggctttctcggaaaacgggggcgctgagaagcccaacttccagctatatatgtcgccaccgcccacagggcccccgacggcgatgctggtgacagcgctccctgcgtgggcgccactctccccgtgctccccgcgcctgcagccaggcacgacggtgtgggtgtgcccgcccggggcagaggagctgcagggctcgcggcaggcggcgctgtgcaagcagcgacgtcgcggcccgaggaagtggaggcggtgaacgcgcgtgggcgcgcctcccgggacacggcgctggctctgcggcgctacctgctgggcactccctaatcgatggtgacgccgtcgctgccgcccggcgaccggcacaaggagtttgcggtggtggcgggcgctgggcccacgctcttgaggcgcctcaagccccctaagcctgttctgctggaccgcgtaggccaccctgcccgctggccccatccattgagccttgaaggcttccagaggcgctgcagttgcagagagcaggagacctatccggcacccgcgtcgtggccgcccatcctgtcgcgctgctggctggcctcagttgtctgcaagcgagaagcaaggcctgtggccacgcgtttggacgaccgccgccccagggtcgctggagtggtctccacacggtgccccactttgccccagagcgtcccgggcgccgagactgcgtgttcctggaggctagtggcccgggtagcctgtgctcctggtgctgcgacgccgaccgggcgtgcgtgggctctgcgccctggcacggtgctgcgctctgtggtggaccagtgcactctctggctttgcgctcttcggctggcgtgcaggtgtttttccccccgaggccgccgcggcccgcgggggttgacacctacgatccctccttcgcgcttatgccctggtgggcgcgttcagctgcagcttcgcaagcatggtgcagccaaacttttccaacgtggaatttgcacctgccccggtgctcccggactgcctgctgggcccgagccgcgtcatgagcagcattctgaccaaaggctggtcccggctcagggcttcgcctggactgaggtggcctaggggcgcaggtgcagggcagtgcaagacctgtagagaggcggggcgcccatgggcatgtttagcttcggcatcgcccaaggcgcaggcttcgggacccaggccgtagggcagccggcggcagatgagcagccctgagggcccaagggtttggggaggtgaaccggcaatgggattcgtggatattaggattggagaaaatcataacactacattccattgcttatataacaagagaggtagttttttttgtttttgtttttgtttttgtttggtggtttttttttgttgttgttgtttgttttggtttggttttgctttgcaccccacccgaccctcaatttttgtatttttactagagactgggtatcagcatgttggccaggctggtcttgagctcctgaccttaggtgatccacccgcctcggcttcccaaagagctgggattacaggcctgagccactgcgcccggcccagagaggtagttttaaaatacaagtctgtccctcctccactcaaaatctccttggcaattatcccatctcccagcaaaagcagtccttacagtggtttaagagttcctacatgatgtgttcccagcacactgctcatctcatctctctcccttgcctcactgtactccagccacactggttgccttactttcttcttcctaccccagggcctttgcactggctgtccccatgatatccctgtggatcactctctcccctccttcaagcctttgctcaaatgtcacctctccactgaggccaacctgactgcccaatttaaaattgcaatccccaggccagacatggtggttcacgcctgtaattcccaccactttgggatgccgaggtgggtgaatcacttgacaaggtcaggtgttcaagaccagcctggtcaacatggagaaacctcatctctaccaaaaaatataaaaattagccaggcgtggtggcacgtgcctgtaatcccagctactcgggaggctgaggcagaagaatcacttgaacccgggaggcagaggttgcagtgagcagagatggtgccactgcattccagcctaggcgacagaatgagactccgtctcaaaaataaaataaaattgtaatcccccacccccaacattacctagccctttcccagaattttttcacagaatatatcactttctgtataattactttttctattatctgtctacaacacatacattccttaagggcaatgattttttttaaccgtttaataacctttaaaaaaaaaaaagaaaactgaggcagagtctccctacgttgcccaggctgattttgaactcctgggctcaagggatcctcctgcctcagccccaccaaaatgctggaatttcaggtgtgagccaccgtgtttggcctgttgtcaagtttttgtttgtttgtttgttgttattttgtgatggagttttgctcttgttgctcaggctggagtgcaatggcataatctcggttcactgcaacctacgcctcccaggtccaagcaattctcctgcctcagccccccaagtagctggggttacaggcatgtgtcaacatgcctggctaattttttgtatttagtagagatggggcttcac[140 bp omitted]aatttaaagtttccaacctgaatgaattttcacatatgttcatctgtgtagccctcacttaaatgaagctattagaacacttctatcaccccacatagcttcatgaggtcagattcttacaaaaagattttgtgcactattaaatctccagcacctgtgacagtgcccagctctcagcaaacatttgtggaaggaatagtaatggttgtaatttgttaaatgtgcaccacatcatatgccaggcactgggctcatagaggcaattattgcccaaggtcatacctttttattacagtgtaaaatgtgaacagtggggtgggagaagggataaaataataatagctagtactgagtgcataactctgtgcattatttctttttaccttcccgcttgtctttgaggttgactatctaataatattgtgggtttttttgttcttttttttttttttttttttttttttttctgagaaggagtctccctctgtcgcccaggctggagtgcagtggcactatctcggctcactgcaacctcagcctcccaggttcaagcgattctcccgcctcagcctcccgagtagctgggattacaggtgcatgccactacgcccggctaatttttttagttttagtataaacagggttttgccatgttaaccaggctggtctcgaactcctgacctcaggtgatccacccaccttggcctcccaaagtgctggaattacaagcatgagccactgcgcctggcctgttttttgtttttgttttttcttttcttttttaagatagagtctcactttcttacctaggctggagtgcagtggcatgatctaggcttactgcaacctccgtctcccaggttcaagcgattcttgtgcctcagcctcctgagtagctgggattacagatgcgcagcaccaccacgcctggctaatatttttgtttgttttttttttttttttttttagtagagacagggtttcaccacgttggccaggctggtctcgaacttctgacctcagatgatctgtccacctcagcctcccaaagtgctgggattataggtgtgagccactgtgcccggccaatttattttgttttgtttgagacagggtccttttctttcacccaggctgctgtgcagtggcgcaaccgtggttcactacagccttgacctctgggctcaaatgatcctctagcctcagcctcccaagtacctgggactacaggcgtgcaccaccatgcctagctaatttttattttttgtacagacagggtcttgctatattgcccaggctggcctcaaattcctgggatcaagcaattcacctgcctcagcctcccagactgttgggattacaagtgaaaaccaccaccctcagcctataataatattgtaacgattgcttttccctggggagaggggccgagaccagagctcaagtctcttgccaagctcacacagctagaaagtggcagtgtctggatttgaacccaggtctgtctgtgtccacagtgcaagcttttaaccacctttttggttgtggggggtgttgttttgttttgtgttttgtaccaccttgcaaagacttataaagtagtctagacttatgtgctaagtggcaagtgcttttataaataatgtacatacattatataatgttctctttacagtcatcctggagatgggtctttttgttatcctcatttcatagagaagacagttgaaggtttaagccatgaaatcactgcccaaggccacatgctgaacagatgtcagctttgaaccccaagcctgcttgggctgctgggaaacaggcatgttgtctcagagggcaccgcgctcggcgaagactcagcgagactggacgctgaccatggttctgaacacactgtgctgcgggacctgggcttttcctgtaaccctgaaatcccattcaacctcttacggtcctgagaaacaacggaagaccagggagatgagagaaaagtgagggaatgctgagagagagaggctgggtttcttagaaatgaagacaaggacttcaattcatttatttataacagctcagagctggactctggagccaagagtcctggatgcaaatcctgctccaagctgtgtgattctgcataagtcaattcatttctctgactatctacttcccctctattaaaggtggataatagtatgaacatcataaggttgttgtggcattttaaattaaattatttattattcctattattatttaatagaaatagagatggggtcttgctatgttgccaggctggtctcaaactcctgggcttaagcaatccacccaccttgacctaccaacacacttggattacaggcatgagccactgcacctggctctaattttttatgtttatttatttattattattattatttttgatatggagtctcactctgtcgcccaggctgtagtgcagtggcgcaacctcggctcactgcaacctccgcctcccaggttcaagcaatctttccacttcagcttctctagtagctggaactacaggtgcctgccatcactcctggctaatttttgtattctcagtagggatggggtttcatcatattggccaggctggtcttgaacgcctgacctcaagtaacccacctgcctcagcctcccaaagtgctgggatcacaggcatgagcaaccgcgcctggccttatttttattcatttatttatttatttatttatttatttatttatttattttgagatggagtttcattcttgttgcccaggctggagtgcaatggcaagatcttggctcactacacctccacctcccaggttcaagtgattctcctgcctcaacctcccaagtagctgggactacaggcacaggccagcacacccacctaatttttgtatttttagtagaaatggggtttccacatgttagccaggatggtcttgaactcctgacctcaggtgatctgcccatctcggccttctagagtgctgggattataggcatgagccaccacacccagccttttttttttaattaaaaaaaaaaagtagagatggggcctcaccatcttgcccaggctggtcttgaactcctgggcttgagtgatcctcctgtcttgacctcagaaagtgctgggagtacaggcgtgagccactgcaccctgccagcgttttttaaatgacttcatagaacactgtctggcatgcagtaaatatttgccagtattactttgcagcaatttttttttcattttcttcaggctaggcctgttctaggcactgcagatgcaacagtgaacaacacagacaacatccctgccctcagggagctgacactctagctcagtccatacgaaaactctatattccatctttttttttctatattccattgtgatagaaaatatgcaaagttctacagaacacaagattattcttaaaagttcactttggggtcaggtgtggcggctcatgcctgtaatcccagcactttcggaggccgaggtgggcagatcaccggaggtcagagttcgagaccaacctgagcaacatggcaaaacctcatttctactaaaaatacaaaaatcagccagatgtggtggtgcatgtctgtaatcccagctacttaggaggctgaggcatgagaatctcttgaacccgggaggtggagtctgcagtgagctgagatcacaccactgcactccagcctgggtgacagagtgagactctgtctcaaaaaaaaaaaaaaagttcactttgtaggtggctagcttcgtgcactgatagcaatgaataaataacatcccttcctgggaagaaggaaggaatatatgtctccagttccccacagcatacacacatgcgcacgcacacacgcgcacacacacacacacacactctcacatcctaccctcaagtctgcttaatgtggcaagttgaagtcctcgatggccagaatcaatgcaccatacatttgcactggcatagagatgctcacataattgaatctggctgtcttcagatgcagcctgtgctctcgagctccctacagacctattctacacccaggccgtgctgatcattttgtccctcagtcccactcttttctttctgctgatacatacagacccagtttattttaaattgggaacactgatagcttctgaatgttgagtttccagtgccagggaccctggaggcccggggtatgaaggcaggtcggggatgaggctaaattccaggatccaattatattgcatccttccctcatctcatctctaaatattttgactgaggaggaagtgagccctttcatagagtcccatcccctcctagtcttccctggtgatgccactccagttccaggtctcctgtgagggccatacatgctctgatgggaccacatgtcagcttgtgaagcacagacttaagtgtgtggctgggcacagtggctcacacttgtaatcccagcactttggaaggcagagatgggtggatcacttaagctcaggagttggagaccaccatgggcaaaatggcaaaaccctgactctacaagaaatacaaaaattagccaggtggcatgcacctgtagtcccagctacttaggaggctgaggtgggaagatggcttgagtccaggaggtggaggttgcagtgagctgagatcgcaccactgcacctcagcctgggcaacagagccagaccctgcctcaaaataaaaaagaaaaagaaaaaagaaaaaaacaaaaaacaaaaaagtaatttaaaatctaaataaataaataaatgaaaaaggcctaaatgtgtgcccaccactcaggtcacatgtgagtctgagaccttgtccagttccaagatggcaggactccaaaacaccgtccatcttcagctctaagaccatggcagtggctgcatcaggaccaaacaacacacctgaagctgagccaaggcttgtgcctgtgctcctggggggacctgagcctgaacctgtggccatggctcatctggggcttgcacaagtgaccgtaaatgaaccctgccctgaacctgtagctgcagccgcaccagtgcctcgacttgtgactgtgaaagaaccacttcctgcaactctggctgtagctgaaccagcacctataccacctaccaaacccatagctaaccattgtctacaaccatgtccaaaaccaagacagtatctgtgtctgggtcagaactgtctcatggccaagctggggctcaaggtggtgacagtgactaaaccaagcttaaagactctggctgtggcaaaattaggacttgactgtagcaaaggacaaggggccatcacaggggctaccacctgagcctctgggctaccatacatctagactttttttctttctttctttcttttttttttttttttgagaaggagttttgctcttgttgcccaggctggagtgcaatggcacgatctcggctcattgcaacctctacctcccgggtagaggttcaagcttgaaggttctaccttcaagcgattctcctgcctcagcctcctgagtagctgggattacaggcatgtgccattacaccaggctaattttgtatttttagtagagatggggtttctccatgttggacaggctggtcttgaactcccaacctcaggtgatccgcccacctcagccttccaaaatgctgggattacaggcatgagccaccgcacccggcctgatttctttttttttttaaagacagggtcgggcctggcgcagtggctcatgtctgtaatcccagcactttgggaggccgagatgggcggatcacaaggttagcagtttgagaccagctggccaataatggtgaaaccccgtttctactaaaaatacaaaaaaattagccaggcatggtggcgggtccctgtaatcccagctacttgggaggctgaggcaagagaattgcttgaattcgggaggtggaggttgcagtgagccgagattgcaccactgcacttccagcctggacgacagagcaagactccatctaaaaaaaaaaaaaaaaaaaaaaaaagacagggtcttgccgtcacccacactggagttcaatgtcacagtctcagctccctgtagcctctgtctcccaagctcaagcaattcgcttgcctcaacctcccgagtacctgggattacaggtgtgcaccaccacgcctggctaatttctgtatttttagagacggggtgtcaccatgttggccaggctggtccaaactcctggcctcaagcgatctgctcacctcagcctcctaaagtgccgggatcacagacgtgagccgtcgtgcctggccagtatacatctagattttcaatgaccacttgttccccatgcctgggatctgcacctacatgctgagctgatgcccctagtccctcctcagcagcctccctgcctcctaactgtgggtctcctgtcctgaagggaggcagcccatgtgctttgtcacagggtgcatctttggtattaccatcactgctgtcaagcacaagtgtggccctatccagataagaatcacagtgtatgggatcttgggagaccccatccttctctgttcatcaattttgggagctttttttctttttcgagacagggtcttgtttagtcacccaggctggagtgcaatggtgccatcatagctcactgtagcctcaatctcctgggctcaagtgatcctcccacctcagcctcccaagtagctaggaccacaggcacacactaccatgcctggctctttaaattgttttgaagagacagggtctcgctatattgtccaggctggtctcaaactcctggcctcaagcaatcttctgtcctcggcctcccaaagcactagaatcacaggcatgtgagccaccatgcctggcaggtcatttttgtcacctctaaaatagaagcaatgatataggctggggcggtggctcacatctgtaatcctagcgctttgggaggctgaggcaggcggatcacctgaggtcaggagttcgagaccagcctggccaacatggtgaaaccccgtctctactaaaaatacaaaaattagctgggcctggtggcgctcacctgtagtttcagctactagggaggctgaggtgggaggatcacttgaacccaagaggcagaggttgcagtgagcagagtgtgccagtgcactccagcctgagtgacagagcaagactgtctcaaagaaaaaaaaaattgtttaccgggcatagtggctcatgcccataatcccagcactttgggaggccaaggtgggcggatcacctaaggtcaggagttcgagaccagcctggccaacatggtgaaatcccatccctactaaaaacacaaaaattagctgggcatggtggcgggtgcctgtaatcccagctactggggatgctaaagaaggagaatcacttgaacctgggaggcagaagttgtagtgagctgagatcacgccaccgaactccagcctgggggacacagtgagagtctgtctcaaaaaaaaaaaaaaaaaaaaaaaaaaaaaaaaaaagatgcaattatacaggtccaaagtcccttatctaaaatgtctggggccaggtgcatttcagattttggaatttagaatggtcaaaccaggcaaatgccacatattatataacactcccagtgtgtgttacataatcacaaacattaatatctttgcagtgaaatgtctgaatagtcacacaaaggaggataaattaagactatagcagccacacatgagttcaggttagcttttgctgataattgagttttaacatcaaacacacaaaacatattcagtcttcaggtcttttggttgttgttgttgttgtttgcttttgtagatggtagataagggattgtggctctctagctcctccctcagcaggttcctgtgaggtgagaatgagttaacacaggaaaagcacttggaacagagtccaactcatggtaagtgtcatatgagggggtgtttgctgtgtttatcatttcctgacacaggcatatgaagcttccaaattccccgagctgtgaacatatcctaggaccacatgcagccactagcatgtcccaaatctctcctccaggaaggtttaggggctctgctctggttagaaggttgtgggggctagagtatgtttaatccgggttgctggctggggggacctgatgaaggttatgatgtactagtgtacccagaccaaaccgagggttgggctgcttattctcacagcctaataatgagacacaaataaactgggaaagaagagaatttttatttctgtaactgattacagggagaaggcctggaaattatccccagatcaactcaaaattataacgttttccagagcttatatacattctaggctatattagaagaaattaatcacttatgtctttagatgaatgcaaacttacatgagtaaatttacttcatctaaatgggtccaggtgctggggtgattacccttatcttgtctcctgctaaattatggaggcttggggagttcctttagtctccaataaagcttgtttgtgaaggtctggggagttccttcagacccccaataaagcttgtataatcttaaatgggaactgttaagaattccttcgtgaggctgggcatggtggctcatgcctgtaataccagcactttgggaggctgaggcgggaggatcacctgaggtcgggagttcgagaccagcctgaccaacacagagaaatcccatctctactaaaaatacaaaattagctgggcatggtggcgcatgcctgtaatcccagctactcgggaagctgaggcaagagaattgcttgaacctgggaggtggaggttgtggtgagctgagatcgcgccattgcactccagcctgggcaacaagagtgaaactctgtctcaaaaaaacaaaaaataaaggaattccttcatgatcttgtcatgcctcaagggccaggaaaggcctggcctaaactcttggtgagcttttgttacattccagcctttgtatggacgctggctctaccagcgttttttgttttgtttcttttttcttttttgagacggagtctcactctcttgtccaggctggagcacagtggcgccatctcaactcactgcaacctcctcctcccagattcaactctcccaggtagctgggattacaggtgtgcaccaccatgcccagctaattttttttgtatttttagtagagacggggctttactatattggccaggctggtctcgaactcccgacctcagatgatcctcctgcctcagcctcccaaagtgctgggcttacaggcgtgagccaccgctcctggcctctatcagcttttagtatttaacccaaccacagtcagtgctaaaacagttgttatggaggcctgcgttcatgagatgtggcttgccacactaggccacccctcagcaccactatagaaaaacaatggtggcctgggttcaaattccggtttggcacttgatatctatgtgaccttggataaattatttaacctctctgggcctcaatttcttcatatgtgaaatgagaatgatgaaaagatctgattcatagggctgtagtgaggattaaatgagctaatatatggaaagcacagaaaatatgcaaagctaggacccgagacgtgaagccatgatgctgcatacctgcctccacaccgcctgggagtttgccctgccactcaggggtcaggatgccccccagtgctcttaaggctccccagcatccagtagcccccaccccaggtatccagaaccttcagatactcagggctccagacttatactctcaccaacatgatccctcttttcccaaggacttgacactcctgtgttccttcctcaattaattggaattttagaattttttttttttttttgagactgagtctcactctgttgcccaggctggagtgcagtggtgagatcttggctcactgcaacctctgcctcccaggttcaagcaattgtcctgcctcagcctcccaagtagcctgggactacaggcacatgccaccacactcggataatttttgtgtttttagtagacacggggtttcac[140 bp omitted]actaacaacatccctgtggctgccagttgagaacagattacagggcttgtgaaggaatgaggcctggaggaacaacagtgaggaggctgctgcagtagtcccggcaggagacaatggggcttggaccagggtggggcagtgaacgcaggagaaatgtgggctggaaaccaccaagtgaggcaaaataaggaaatcatggactgggagaaaggaggtaccccttgatctggaaggacaggtggaggctcttggtaatgggggaagcccttgggtcctgtctgaaggctctcctgtttactggatgaggtgggcacacctggctccttggtaggattactcatctagattcctgagaagaggacttgcaagtattgtgttaggacaaatctggatattgaaatcaagactcccagtttaaaaaaaaaaaaaaagaaggccgggcacagtggctcacgcctgtaatcccaacactttgggaggccaaggcgggcggatcacgaggtcaggagttcaaaaccagcctgaccaacatggtgaaaccctgtctctactaaaactacaaaaattagcttggcatggtagtgcacgcctgtaatcccagctactcaggaggctgagagagcagaattgcttgaacctgggaggtggaggttgcagtgagccaagatctcgccactgcattccagcctgggagacagagcgagactctgtctcaaaaaaaaaaaaaaaaaaaaaaaagattcccggatagaggctgggcatggtggctcacatctacaatcccagcactttaggaggccaaggtgggcagactgcttgagctcaggagttccagaccagcctgggcaacatgacgaaacctcgtctctacttaaacacacacacacacacacacacacacacacacacacacacacacacacacacacagaaagattcttggttagctgggcacggtggctcacacctgtaatcacagcactttgggaggccaaggtgggcggatcacaaggtcaggagatcgagaccatcctggctagcacagtgaaaccctgtctctactaaaaatacaaaaaattacggggcgtggtggcaggcgcctgtagtcccagctactggggaggctgagacaggagaatggcgtgaacccaggagacggagcttgcagtgagccgagactgtgccactgcactccaacctgggcggcagggtgagactctgtctcgaaaaaaaaaaaaagaagaagaagaagaaaaagaaagattcttggttagtagacgagggtggggcatcctagatctgcaaaggccccactctcaatatcccagaatccaaccccctcaacctccttatcctccacccctccccgatgctcaggaattcagcccctctgaagaccccagctcttggtcactcctgcaggggaacccacagcagctggggctgtcagttatcctgggcgacagatggctatggttgtacttccacacctcagaaccatgggcagaggcaggtctggagcaagaaccgcccacactgcatctcttttacaaccggcagcacacacgtcactgcacgtggctgaaggttgccactcacacaaggcagactgtgcagtgacttcattcaggcaggaccatgacatgggcagtccagatccactggtcttcgtgcatttgggccccgcagccacctgataccctgagccaagccttagtccccacaggagactgggggccctgtgctgtccctgtagccccaaaggggccccttagccactgccaccaagtgtgacacctacacccttcgaggccagtgccgtgcctggatatgccccttccccagctccctgcctacgctttgggagtgcttccatgtctgtgtacaccctgtcaggcctcagtgtcaacactgagccctcgagcttctgggctggctgccgtgagtgacccttcaagggaaagggttataggctgctgggtaaaggggattctgggacttaggaatgacactccttagttctggaggctgattcctggggcaagggtgtagggtccctggaaggggacagcctctgggtcctgggggcaagactgctgagttggggggtgcggggaaaataattctagggcccagagacagggctctttgggtctggggccagggcttctgggtcctgggcatgggaacaacttggctatagggctgggactgctgggttctcaagttctagagactagaacacctaggtggtgacaactccagtatctggggtgagcgctctgagtcccagagccagacttatttatttatttagacaggatgtcactctgttgtttatttagacagggtatcactctgttgccaaggctggagtgcagtggtactatcatagctcactgcagcctcaacctcccaggctcaagccatcctccctcctcagcttcccaagtatctgggaccacgggcatgtgccactatgcccagataattttttaattttttttgtaaagatgaggtcttcctatgttgcccaggctggtctctaattcctgagctcaagtgatcctcccaccttggcctcccaaaatgctgggattacagatgtgagccactacgcctgtcccagagccagacttctatgttctggggagtggacttctggtttcttagcacagagacttctttactctgtgaggcagggattgctgggtctgttgcctggagagctccattctagagggtgaggaccacaggatgttggtagggattcctggaagctgagagcagggacatttgcactataggggtggccaaatgcttgggtcttggaaaccagacctgggagtcctggtgtgaatacctttcccttcctgtctttctccatccccactcctgcccctgcagctattgagtgccccgaaaacaatcactatgagccatgtggcttatcctgtccagagaccccccacaggcaggcccactgggggttaccactgccctgcgggcatacttgtgcctgcgacacaggctgcttcttccttttttaagagacagggtcctgccaggcgcggtggctcatgcccgtaatcccagcactttaggaggctgaggcaggcggataatctgaggtcaggagttcaagaccagcctgaccaatatgatgaaaccccatctctactaaaaatacaaaaattagttgggtgtggtggcaggtgcctataatcccagaatctagggaggctgagacaggagaatcgcttgaactcaggaggtggagattggagtgagccgagattgtgccactgcactccagcctgggcgacagagcaagactctgtcaaaaacaaaatcctagaatctcaagggcaagccccagtgtaccagaagtgtcagactctgggatcttggaacccagttctgagccaataattccatttcctcattcaacaaccatatattgagtatctactgtgttccaggcactatttgaagtgcttctttaagtatgttaactgaatttcagaacacactctcagtccaggtcctgggcacccccatataggatccaggagttctaaagtcccaatccccaatgtttacaaaccctcacagccccccaaatcctagatgccaaacacaactgctgtggacaacaacgatcagaaccatggacagcagttcaggcatttgtagctgctgtgggcccaccccctgcccagtaccagtcatcacagcaccctggaacccctgccattacttagaaagtccagcatccttggaatgcttatagaccagcatcacctatgaacctcattcatttattcattcatgcattagttcgacaaatatttattgagcaccaactatgagctgagaactgttctattttatacacgtgtgtgtgtgtgtgtgtgtgtgtatgtgtgtgtgtgtgtgtgtatgtatgtatttgagacagtctcactcttgcccaggctagaatgcagtggtgggaccgcggctcactgtagcctcaaccacttggacttaagcaatcctctcacctcttgcccctgtagcctctctagtagctgggactacaggtgcaagtcaatatgtatgttcattttttggaaagacagggtcttactgtgttgtccaggctggcctcgaactccaggattcaagcaattggcccgccttggcctcccaagttgctgagattaaagcatcacctactgcacccagcctattctgcacataaactatatcaattctaattgaggaaaactatagtcccaacctccagaatccataattcttacctctcaagatttgttgaaaagggtggtcaggatcatgaacagcagtccaagcatttctaggtttgtggacagacccccagcccctcaactggccccccagaacccctgctaaaagcaggggtccaggcatccttggtactgacactgggcccccaagctctagcttgacctgccctctccccgcaggtgaatggtgactgcaagaatctgcacttacaggctccaggcaacagtgcactcatcttctgccagggctgggacaccatggccagctgcccctttggcctgtgtgggacctacaccccgggatccatgcaacactgatgctaccagcagcaataggggcggggttaggtgctgactacactggggggtacctggatgcccagagttgaggcaagcaccaagctgcctgaggacatattggcttgggcctgtggctgcttggtgggctgtctgggtgtccaaatgcctctggcaagatgccatcatgaccaccatcctgtgccaccctgccaaccactagcaccctggcccactttgttcacatctatggcatcctcctggatgccctggggcccctccagctgtgtcatgagttgctggcaccaggtccctatttccaacactgagtggtggagatgtgtctgggtgctggaccctgccgcatgctcatccgggtttgttcatctggggagcctggctccactcccgactggagttcagctcctcagctgttgcctatcccaggatggcagaccctcactgccccatttaatccctgagaccttgtacttcccgtgatgccggcctcaccccctccccactcattgtccagacttgacctcaaccattgcccatcctaaagtgtcagccctactctgattaaagccagcccccacctcatatgcttccccaatctcagccctgattatggcccagcacttcagcccttatctcttcagggactcagaacctgatcacggcccagccccgaagccgtcacccatcccagagacccatcactgcctgtgaaccacagttagccacctgggctttactgatctgaggttccagcttcagttctgtctaagctgagctctccagccccacccctgcagggcaccagatgacagatcctagcgccccctgcatggagggtgggcccacggcagccacttgcccgccatctggtgctgctgcctgccaaggttggtggcttgcaaaccctgccacatcccctaggaggccccaggcctctgcacagcctcaggcaactccatgaccgcccctttgggagcaccacatttgggctcctgggtgtctgcacggttttgggctgcctgtggggtgtgcagcccttcgaggtggtgctggagagagacctgggactgtccggcctctgccatgtgctgctgctatgtgtgcatggccactactttggtgtggacctcggtaaccagggacagtcaagagaacccttgtcctgtcatttacctcattttagcaactttgcatctctgttccggtggacaggatctctgtgtatggctctctgatgccttccttcccttccccttgccaacaccctaatttccactcttctcctcccttctcccatctgcacttctgtatcgctctccttccctttccctttccttatttctttctttctttctttttttcttgatggagtgttactctgttgcccagaccggagtgcaatggcactgcaacctccgcctactgggatcaagcaattctcctgcttcagcctcctgagtagctgggattacaggtgtgcaccacgacacccagctaagttttatatttttagtagagatggggtttcaccacattggccaggttggtctcaaactcctggccacagctcatccactggcctcccaaagtgctgggattacaggcatgagctgccgtgcctggccctcatggtccacattggaccttaacccatcctaaagtgccagccctgctctgattaaagccagtcccctgctggccgcacctcctgctccatgcagcccagtctcactgtgtctcccccactcccctcctccctcacttcaccacgccagcacgccccaccactctctcctgccccaagtcttcatctccccgttctttctcctcctcttagatctggaagtgacccctctccccaacagctgccattggctcctccccaaaccccttccctgcctgcccctccctcaccaccaacccttcctctcagaatagcccctcgtcctcttagtctctccagactcctccctggctctagatccctcccttgtccctaatgctaatccctgtttctccccacaccgccctgcccaccctactactctctctcctcctcccttggtctccacgcccctcccctgacttcctgccgtggtgctggtcgtactccacaatgcccatcctgagtgttgcctacaaccccctcgcctcggctctcccctcccccacagtcccgtgtttcttcatacctcacccccatgttccttctcacatgcatctgatccccctccactcttcccgcaccagtcctggcacaccgcctccgacctctgattccccgtggcctccatggcaactgcaaaggtaagacagcaggtggatgacttggcagctgccgaggcccgagccctgcgccccgccgcatacttgcccaaggtcagtctgtccggcagccaccgaggaccctggcacagacacgatgtggtccagtgcctgtagcctcttgcctagccagggacccactggcaccctgtcacacacacctgtcaccagacagtccttcttccaggcctgcgtggccgaagtggaccacatccctggaaccacaaagtgccccatgcctgcctgtgagctgatggctggtaccagtgtgctgtcctggagggcctgggcctctgctgtgagtctccacccaagagcggacagagccagcatgaggcagggcctgcaagagacctgggtctggtctgtagtgactccacaggtacggattgaggacctactaagtgctgggcataggctggagatagagcaccaacaggatagagtcctgcacatacctttttttttttttttttttttgagacattcttgctctgtcacccaggctggagtgcagtgacgcaatctcggctcgctgcaacctccacctcctgggttcaagcgattctccagcctcagcctcccgagtagctgggactacaggcactcaccaccacgtccggttaatttttgtatttttagtagagatggggtttcaccatggtg[137 bp omitted]tttcttagctaacacttacagggcacacaacctacatcaggggctacctgaagacagcagttcttaaagccccccagcagcattagcaacacccagagcttattgaaaatgcaaaatctggccaggtgcagtggctcacacctgtaatcccaacactttgggaattgcttgaacccaggagttcaagaccagcctgggcaacatggcaagaccctgtctctgcaaaaaaagttaaacaattagccaggtgtggtggcatgtgcctgtggtcccaaccacagctctggaggctgagtagggaggatcactggagcccaggatttggaggctgcagtgagttattatggcagtactgcactccagcctgggtgacaaagtgagaccctgtctcaaaaaaaaaaagggccaggcacagtggctcacactgtgatcccagcactttgggaggcaaaggcgggtggatcacagggggccaggagtttgagaccagcctggacaaaaccccgtccctactagacggggcaaaaacccgtccctactagaaagacaaaaattagccggaggccgggcatggtggctcacacttgtaatcccagcactttgggaggcagaggcgggtggatcatgaggtcaggagatcgagaccacggtgaaaccccgtctctactaaaaatacaaaaaattagccgggagtggtggcgggtgcctgtagttccagctacttgggaggctgaggcagaagaatggcatgaacccagaggcggagcttgcagtgagctgagattgcaccactgcactccagtctgggtgacagagcgagactccatctcaaaaaaaaaaaaaaaaaaaaaaaaaaagaacggctgacctttactgagtactctctcagttctaagccctgttctccctcaatcaatcctcccatttacattttatggatgaaggaaaccaaggcatggatggttaaggaatgtgcccgatgtcacatgcctaaaacatggcatagctggcatctgaatatttgttcgtggatttaacagattctccccaacttggagtctctatatccacgtctcctccatgtgcctcaaggattcctggccccaccctgacttaccctttttgggtcaccatcctccactccccccatctctttttgcctctaggttgaagtgctcgttgagggaatctgtctggccttttgctatagattggcctctcgcccccgcgaaacacacacactttttgtccagctctgacctaaccatctatggcaagaggtagggtcatgtgaacacaatgtggtcactctatcaggaaggattcttttcttttcttttcttttcttttcttttcttttctcttctcttctcttctcttctcttctcttctcttcttttcttttcttttcttttcttttcttttcttttttgagacagagtcttcctctgttgcccaggctggaattcaatggtgtgatatcagcttactgcagcctcaacctcctgggctcaagcgatcctcccatccttgcctcccaagtagctggaactacaggcacacgccaccatgtccagataatttttgtactttttgtagtgatgggcttttgccatgtggcccaggctggtcttgaattcctgggctcaagcgatccacctacctcagcctcccaaattgctgggattacaggtatgatccactatgcacagaccctggagaaaatttaacaccctttgccatcggttcctgcaaaggtcccagggttgcctctgataggctttgcctggccaatgattggggcccagaggcgtgagaaataagctgattaggcagccctgggtcctgtacacatcactggatcctggatatggaatcccttcagtgcacatgctgaaagtacgggcagctgccaaaaagaaggtgcaagtattattattagaagggtgagggacaggcgtggtggctcactcctgtaatcccaacactttgggaggctgaggcgggtggatcacccaaggccaggagttcgagaccagcctggcaaacatggtgaaaccccatctctagtaaaaatgtgaaaaacaacaacaacaacaacaaaacagctggcgtggttgtgtgcacctgtaatcccagttacttgggaggctgaggcagaagaatcgcatgaacccaggaggaggagtttgcagtgagctgagatcgagccactgcactccagcctgggtgacagagcaagactccgtctcaaaaaaaaaaaaaaaaaaaagggtggggaaggcaaaaaaggcattcattactagagatccctgacaggttccccacacacccatgatgctgggtgggaccacatgtctccctgtcagcagaggctgggaatagtaggcaagacccctccaaaaaaagagcaaggaagccatgtttgtcatgtccagggcacttgaaagtagctagcacactgcatggtatgcagacactgcccagtcaatgccggttgttattattgctgctataattaatccaagggggagggttgctgggaggatgctgtctggggatgctggttgaatagagggtgggtccctggcttgcctgagcctctcaagccacctctccaaagccaggctgtgttcctggcacagccaccacagcctgtgtgtgaacccaggtgtgcaagaggtggtagggctccccactccccatgctgagggccacaagtgtaaggatggagtcttcccggctgggggtgactgcatccctgttcctccttctgcaatggccagtacttccctgcaagcattctctccggtctttgttaacagtcttgcttgggtcatccactgattccccgtacttatccttacatgggtcttatctcagaacccatagctgcaccctccctccatgaccacctcaccatccccacaccacccccaacccccattcctccccagcctggccagaccatcctcatcaaggtcccttcctcctcctgtacctgctggctaggagaggctatgacccatgttccccttcagctgccctagagggcaggtatgtggcatcacagatggagtcttaggctgtcaattctgaggtgtccatggctgtggctttggtgcagttgtgtggttacagaagtggagtcaaagattggggcatgaggccaggcatggtggcttatgcctgtaataccagcactttgggaggccaaggcaagtggatcacttgaggtcaggagttcaagaccagcctggtcaacatggtgaaaccctgtctctactaaaaatacaaaaattggtcagatgtggtcatgggtgcctgcaatcccaactattcgggaagctgagactggagaatcacttgaactcaggaggcagaggttacagtgagccgagatcgtgccattgcactctagtctgggtgaaagagcgagtctctctctctctcacacacacacacacacacacacacactcatgcgcatacacacacacacacacacacacacatatcggggcgtgacttctggatcatgagaaagaagggactggggaccttgtcttcatgggtccctgatccctcttcctctgacagccccccacctcgacccctgccctgagtcttgtgaccccaccacttgttttcccaccattgtgtcccagccacagtccccagtgcccagaatactcctgctttgtcgcacatggctctgcatgcccagccacatgtgccaacctcatcagccccagtgcactgcagccaccctgtaccgctactttcaaagcctgactagctgcctgctgcaggagggctgctgcccagcccttggggtcctggtaaccagggtgccccagtgctggcctgacaagtgccaagatcactgcaaggcctccacaggtagctggcacagctgcctgtcaacccagtccctgtccagccccattgtcctggaggaatcacaggtctgcactgccatgggagctgtctgtttccacacatttggaggagctcactatgaattcctcatctcttgtgtccactgcctggtgcgtctctgtggcgcagcccatgccaaccttgagccttcagcctggatctgctcccacttctgtggccacacagcttccccaaggccctgaccctctcaccctgtggcccgaggacatgagcccaaaagacctcaaccacagtgaggtgaggctccaaaggccccacactgacccactcttcctcactgtcccatctactccccggtcacccatgatgactactcttttcctactgatgctccctctagtagttctgcccctggcccttaaagatgtctactccaatttcctagtggccctagtggcaccagtggctactcaccaccttccccttgacttgcttgttgacccctccccacgactctccacttgtcattattattattattgagacagagtctcatgctgctgcccaggctggagtgcgatagtgtgatctcagctcactgcaacctccacctcccaggttcaagtgattctcctgcctcagcctcccaagtagctgggactacaggcacgtgccaccacgcctggctaatttttgtatttttggtagagacggggtttcaccatatagcccaggttggtctctaactcctgatgtcaagttatccacctgcctcagcctcccaaagtgctggaattacagggggccaccatgcctggcatccacttgtcattattaaccgccattgagattccacttaccctcccattgactctccattgaatcctcaatagtcatcctattaactccctaattgaatcccctcaacccacaggctcagcctcatctctgcattgaccctccctgtcattggacatcccattaattatttcattgagtcatccattgccctcccccagctgatcctactacgtttgtttgtttgtttgtttgttgagacagagtctctctgttgtccaggctggagtccagtggcgtgatcccggctcactgcagcctcaaccttctgagctcaagcaatcctctcacctcagcctcctgagtagttgggactataagcacacgccaccacaactggctactttttaaaattttttgtagacagggggtctcgctatgttgcccgggctggtcttgaactcctgggctcaaatgatcttcctgccttggcctcccaaagtgctgggattagaggcatgagccaccatacctgaccaatcctactgctgttatactgacttgcccattaatcccatttactgtcctattgaccccacccgacaccgtcccgacctcccacactgatgctttctgagcagtttgttgaccttcccagtgatccattgactggcctattaatgtcctcatttaccccctgtggacctgcccatcaagcccccacccctgccatctactgattctctactgagcttcctatactggatatgactaactcctgcactgcattcccctgcttttctattatccctctaattgagcctctctttgactcatcttctcaccctgttgagttttctatagtgtcccattcattcattggcacaccttctcctagagcactgtccaagtctcactaggccctcattgatcatagaggcatccttcccagtaggatgttgcccattaaccttgaactgccatccacaaacccagcagcgtttgtcagtcactgactacccttctgactccacccccatttactctccaggggagcccccattgtcgcccaaagccactaagcctcggtcctcagtgatccacggagttgtccatcccttcctccattgcccttttctagatcctccccttgccccccgctgctggcccctcttcactgactcttatccattctcttattgcccctcattgaacttccactgacctctcatcaactctggccatccaaccactctgccatggatccccctttgaatcctatactgaccccccattgagccccaagcttacctcccaccaaatcctcctatgatccctaatgactccccccattaaccagccactaaggttctctttgacccctctctgatcctttctgctgactcccccactactcagtgaccatctcctgctgctgttcaacctgcctgcatgccctctgtgtaggtagacggaatttgggaatcgctgcccttctcttatggccaccacctccacacccaactttggggctgccagctgtacatggacacagactttggcctcttgctatgactgggacagcctggcacttgtgatgctgccatggccatatggaccctacctgtgtagactctggccccagtgaccctattacatccttgcccaatgcccggaaggttgctaagttgccaggttgcagccaggtctgtgggcccctctgccctggattttgccagatggccgtgcatgccctattcaccaggaatgggcagtgagtgtggctggcagtggcggtggatcccttggagcccggctatgcagcactgtgaccaggcccattcctcagcaagtgcctggcccactgtgtgccaccaatacagcgcccactgaaccatatactgggccctggctgcctacactgtggcttgcagggctctgggagtctgccttctgtcacgagtgtgctttcgagagaggggtaagctctgaagagccctgacatgggccaccaggggacggtcgcgtcaggaccaacagaagttcaggcctgggcagtggggctaggcgaggaagggtgggtactggagaacagttaggaccagattagatgcggcaagacaggcaggggtatgacttgatttgattggtctggtttgattaacaaggtctttttaaaatttttaacaatttttatagagacaggggtctcactatgttgcccaagcttgcctcgaatccttgggcgcaagcggctctccctcctcagcctcttaaagtgctgggattacaggcgtgagccacagcgcccggcctgattaacaaggtctttctgtcttttatgcctcttttttcggtgtctctatgtctcctccgtgccgctggctctctgcatgtctctctttctggacctccctctgccccgccccttcccctgttcccgttccccttctctcggttcctcgttgtttcttccccgggcacacccgtgctgctctctgcgggcatcctccatctccgcctcccccatccgaccctggctatgtctcccccacctctctctgtctctgtccctgaccctcccacccccgcggcccgccccagctttgcggtgcccgctgcgttcgcgctgagctgcgcgctacctggccacatgcgcgggtgacagccctgccgggagcgctgagtatgcggccagggcttcccgctgagcggcgcctctgagtgcccgcagccgaatgcggctgcttccttgcaggcggacacccaccgctgggcaccgtctggtaccctgcccctgcggcccccgcccccgcgctccgcccctgtgctctcccttgctggcccgcaccattcccgggctcaaaaaaataaattaaaaattaggcgggggggggggggggtggtgcgcgcctgtgttcccagctgctcaagagactgaggtaggaagatccttaagcccaggaggtcgaggctgcagtgagccatggtggcgccactgcactccagcctaggcaacagagccagacctcgtctctaaaagaattaaataaaattaaaaagtgtatgtctttaaaagataagggtgtttaggccaggcacggtggctcactccagtgatcccaaccctttgggaggccgaggcgggcaaatcacttgaggtcaggagttcgaggacagcctgggccaacatggtgaaaccctgtctctattaaaaacacaaaaattagccggaagtggtggtgcatgcctgtagtaccagctattcaggaggctgaggcaggagaattgcttgagcccaggaggtggaggttgcagtgagccgagatcgtgccactgcactccagcctgggcaacagagcaagagtctgtctaaaaaaaataagaaaaaagaaaaaagacaaaaaaaaagataagggtgtttagcagagtcagctagatggtggggatggagtataggaaggacaggcatgactgagtagagacaagataaagggttatggcctggtgcggtggcccacgcctgtaatcccagcactttgggaggccaaggcaggtggatcacgaggtcaggcattcaagaccagactggccaagatggtgaaaccccgtctctactaaaaatacaaaaattagctggccatggtggtgcgtgcctgtaaccccagctacttgggaggctgaggcagagaactgcttgaacctaggaggcggaggttgcagtgagccaagattgcgccactgcactccagcctaggtgacagagtgagactctgtctcaaaaaaaaaaaaaaaaaaaaggtaacaggttattagcagggtcgggaaatgaatgatggtaatctagactcttgatggttacaaagcagagataagtgatcatttaagcaatagagagaaggtggaattgatactttggtaagtcattcctttcctcacctagaatgttgaacacatattaccaatgtgctagtgactggctatgatgttttttgtttggttggtttttgttttgttttgtttttggagacagaatgttactctgtcacccaggctggagcatagtcatgtgatcacagctcactgcagccccaaattcctgggctcaagtgatccccccgcttcagcttctggagtagctgtgactacaggcatgccccaccatgccatcctaatttttgtagagatggggtctcagtatgttgctcaggctggtctcaaacttctgggctcaagggatcctcctgccttagcctcccaaagtgctgggattacagatgtgagccaacatgcccggccaatttagtgttttatttagtgcttttcatgtgctcagcactgttctgaggaattttcatgaaccatctcatctaatccttattgcaactgtatcagtcagctaatgctgcataacaaacaacctcaaaatcttagtgacttaaccccaggcagcttcctaactcatgtgtctgtgggttggttggcattggccgatcttagcaggggtcatgaagcacttaccatatgcctagcataggtactcttttttttttttttgagatggagtctcagtctgtcgcccaggcagtgcaatggcaccatcttggctcactgcaacctctgcctcccaggttcaagcgattcttctgcctcagcctcctgagcagctgggactacaggcctgcaccaccacacctggctaatttttgagtttttagtagagatggggtttcttcatgttggccaagatggtctcgaactcctggcctcaagtgacccgcccacctcaacctcccaaagtgctgggattacaggcatgagccaccgcacccagcctgaagtaggtactcttgtccttccatgttacaaacacagaaactgaagttcagaaaggctaagtcccttgtccaagtctcaccctcatttgtggcgcaatgaggagggacatccaggtttcagggaggcatgggagcaggttcagcctcctcagccccagtcctgaccccttacctcccctgcaggtggatggtgagcactactggctgccctgggcactgccagggggctggggttggccgccttggagggccaccatgccatggtgcacatggcctgtgggctgtatctcatgtacacctggggaagctcatggtgccttctgaattctaaggcgagctggcggggctccatgggtcctttggaggcaatgttggcctacttgacctgcctctggataccgtgtcctggtccaagggcctgatcactatccactgcccactgacccagcccaaccatggctttcatgtcagctgcccacatgacttgcccagatcttcaaagctcccaaactgtgtggcctcctgcatgtgccggatggcccctttaaccactgtgtggcccacatcaacaagcccttccttagtatatgcctgcaggatgcgtgtcatcccagtggccagcaccgtggtctctgtgacactctcacaggccatactgcagcagccaggagcctgggaaccctgtgatgccctggaggggccccaagcattgccataagtgctctggcttggtctggggtgcaggcagggcagactatgggttggctggaagagccccttcccctggtgggagtccaggaagaattcctagcataggtggaattggtggaggagaatgtgtgggaagaggatccaagggaaagggaactgcagctacaaaggtgtggaggtggggaaataccaatgggaagccaggctgactaggggca[131 bp omitted]gtaaaacagtgtctctactaaaaatacaaaaattagccgggtgtggtggcacacacctgtagtcccagctacttgagaggctgagggtggagaattgcttgaacctggaggtggaggttgcagtgaatggagatcacaccactgcactcgagcctgggagacagagggagactccatctcaaaaaaaaaaagaagaagaagaaaggaagaaggaagaagaaggaagaagggaaaagaaggaagaagaaggaagaaggaaaaagaaggaagaagaagaagacggaggaggagaaggactaggagaaggaggaggaaggaggaaggaggaagaaggaggaagaaggaggaagaaggaggaagaaggaggaagaaggaggaagaagaaggaagaagaagaaaagaaatttgagccctaggcatttatctttgccaactgcctgcagcacagacctgcccaccccaaggccattacagcatctgtgcacagacctatgatttggggtgtgtcctgcctgccaaccccgctcactgttcctcccgatgctatgagagctatgaacgtggcctcaccattgatggcacagactgtgtgtcccaggaccactgtggctgcttccacaatgaatgctaccttctggtgagagggatctccaggcctggaaggtgaggacaagtctcccaaacctcatcataagatgttccctgaatcaccagtatatcagtcagcattttcagttgtaaatgacagaaaatgatgccagctgtcttaaatacagacgagaatttgtctgcttttacttatctgtaaagatgaggccttcaggtctggctggttcaaggactcaaatgatgttgctaagaacttagtttctttccatctttcatcctcgccttttcctttttctgcgttagcttctatagtaattaggctccaggtccatatggtagaacaaaagctcaaaattacagtggcttaagctttttgtttgtttttagagagagggtctcactctgtcacccaggctggaatgcagtggcgtgatcatagctcactacagccttgacctcctggactcaagcaatcccgacacctcagcctcccaagtagctaggactacagttatgtgccaccatgcctggccaattttttttttttttttttttttttttttttttgtagagacaaggtcttgttgtgttgtcccggctggtcctgaactcctgggtgcaagcaatcctcccaacctcagcctcccaatgtgctaggattacaggcgtgagcaatacgctcagcctacagtggcttaaacttgatagaagcttaattatctctcacaggcagtccaagtataaccagtttgcttcctccaacacaggctccatctgtcacgtggctctgcctcccctgtggtattgccctcatctcttcctcaccgcagctacattcctgcaagttggaaggagaaaagagggcacaaagaggccaggcctcctccctttaaggacaaaacccagaaattgcacacatcacatccattcacttcccagtggccaaactttatggaagggccccatctggctgcaaagggggctggaagatgtatctttagctaagtggccatgtgtgcagctaaagattctaatttggccaagtgcggtggctcatgcctgtaattccagcactctgggaagccgaggtgggaggatcacttgagcctaggaatttgagaacaacctgggcaacatggtgaaaccttgtttttataagaaatacaaaaattagccaggcatggtggtgagcgcctatagttctaggccactgaggtgggaagatcacttgatcctgggaatttgaggcttcagtgagtcacaagcatgcccctgcactccagcctgggcaacagagcaagaccctatctcaaaaaaaaaaaaaaaaaaggaaaagacaaagaaaaaaggccaggcatggtggctcacacctgtaatcccagtactttgggaggccgaagcaggcggatcacttgaggtcaggagttctagactagcctggccaatatggcgaaaactcgtctctactaaaaatacaaaaattagccggatgtggtggcgcatccctgtagtcccagctactcagaaggccgaggcaggagaatcgcttgaacccgggaggcagaggttgcagtgaatggagatcacgccactgcactccagcctgggtgacagagcgagattccatatcaaaaaaaaaaatgctaattctaggaaagaaatggagaatgggtatctgagactgccacagcctcattttcaaactacccctctgcctgcgggaagtgatctcccactgctccaggttgatgatgtacagtctagcagtcccagtggggagacagcacttctttcttcacagtttcaacagaagtcccgggtctgattctcattgtcccagtggaggtcatttgcccatccctaaacaattacaggggtcaggggatgggatattctgatttgtctctaagtagccaggcctgggcatgtaacagagctgtagccagagccagagggcagggatattacccaggaaatcccctagaataagagtgggccagttccccaaagacaaactgagagactgtaaccagaaaaccattgacaggccctgggcaggaggcaatagtattccctttgaggttttgcagctccttgagtccactggaaagtaaagaaagtccccctaggctgattgacatagttgtcttggagattaagggtcatttgacaggaaaaagatagatgtttaaattccagagtacaagccagcatggtggctcatccctattatcccagctacttgggaggatgaggccggagttcaagaccaatctgggccacatagcaagaccctgtctctaaaaacaaaacaaaaaataaatatttaaaattccagagtgaagcctgggcaacacagcgagactctgtctctacaaaaaacaataaaagaagaattagccgggtgtggtgggatgttcacgtaatcctaaccactggacatgttgaggcgagaggattgcttgatcccaggagatcaaggctgtagtttcaccaatatggtgaaaccccgcctctactaaaaatacaaaaattagcccagtgtgctggcacatacctgtaattccagctactggggaggctgaggtagggagaatcacttgaacctagaggcagaagtttcaccatgtggatcaggctggtgtcgatctcccgacctcaggtggtccgcccgcctcggcctccaaaagtgctggaattacaggtgtgagccaccgttctaggacatgtatttttgatagatacatacacctgccaggcaggattcacagtggtttgtgattctcccctgactccaagactccaagcctaatccccgcccctgaccagcttctcctctctgaaggggaatggaccccccagctggttgccggcccaagtgtgcagagccgcggttgcgcgctgggtggaggggtcccccaagctccggtgctggtggggcccgaggatgctgtgtccttgcgggcctccctagcgctacgaggacacctccaggcggcccgcggggacaacaacggcattgcggcctaccacctaaagctcctgggaggacaacggggttgcagtctagtcgactgttcagggtgtcccggactccgggctttaacagtcggtaaggacccaaacaccgctgtccactgccccgactcccacccgcagagggcgcgaccaacccagctcctagagccacacgctgcctctgggggcttggcgcccacactctctctgcttgtcttcccctggcccgagaagcctgtccaaccggccgagagccatttccctacggggtctcgtccctctgcacgtgcccagggctgggaccccagacacagacctgccccggacgagggaacgcacggagcttcccaagatggtttgaatcagtaactgacggcaaaagcacgcttgtgcccggcgtctctcccagtgccccgtgcccttgggacccaaagtccgaaccggtagccgggcgcggtggctcacgcctggaatcccaacactttgggaggctgagaatcgtttgagcccaggagttcgagccattctgggcaacatagggagacccatctctgcaaataataataataataaataaataaataaataaataaataaataaataaatagcgggcgcggttgcgcgcgtctgtggttccagctactaggggagttgaggtgggaggatcgcttgggcccaggagttcgaggctgcagtgagccaagatcgcgccactgcactccagcctgggcgacagcgagaccccgtcacacacaaaaaaacccctagcttcctcttctcccagaatgcaggagttaggtgaggaccctctgttccctccaacccaagacctaggagtccgaacacataacgccctccaggcggtgccaggatccccagaactgctgtcccctcaagaacacacgtcccctacgtgggaggccgcgaccagcgactccgcccacttctcccagccggctgttacgtaactgcaacgacagccagtcagacgcggcagcgccggatggcgggaggcgggagttggaggccaagggaagcgctgggcggaagtggctgtggctttgccctttggcctttgctggctgtgtggcggctccgcggttcgcaggtcgttcgctgagcgtctctgcttagccgcggtcatgagccggcacagccggctgcagaggcaggttctgagcctgtaccgcgatctgctgcgcgccgggcgtgggaagccgggcgccgaggcgcgagtgcgggcagagttccggcagcatgcgggcctgccgcggtccgacgtgctgcgcatcgagtacctgtaccgccgcgggcggcgccagctgcagctgctacgctcgggccacgccaccgccatgggcgccttcgtacgcccgcgggccccgaccggggagcctggcggcgtgggttgccagcctgacgacggcgacagtccaaggaacccccacgacagcacgggggcaccggagacccgccccgacggacggtgacaggcgaagagccgaactcgctcgatggcgtggtggagccaggaggctcgcctgactgcatggggggactggggaacccgcctaaggtgagaggtcttaagagactagcttgacgaattggggatgtcagagactcctccttggcgacgcagggggcctagagagccccgtgatggacggcaagggaggcccgccttttccgatgcttggagacaggtcggtgctcctcccccatgagggcttggggcggcctgggacgctggcgggctggacagtgtcaagccaagagctacttgcccgaaggtacggggagccaggacgacccccggtggacagggagagcctgagacgcccttctcttgacccctgagaacatacccacttctggctcctcaaggagtctcccctctcctgtatttaactctgagaagtgcagactttttgctgagaacgttttgggaaggtgccctgatgagcggtgagaagcccggaatccccttctggaaaactttcccccattaattgtgacaagccaggaccatgaggaaggggtaggggtctatcaccctggttgatcaactgaagacccccaaaggcccctacttgatggttttgaggggcaacattgactcatttgccccttccctctcggaatgttggacaaagggaataaaattggggatatgtctacttccctgttggtggtcttaaagcttttatatatttcaggatttttgaaacacccccagcccccctgccaccacacacacacgcacacagacacctggaagggaccatctgggaggtgataggtgtggggatctgactccttccggagccctgtagactggcacattgattgaagcggcatagttttctcccctgggcagatctgtggagggggctcatcctggcttaacccccaaagataccccagttggctccctaatggagggcaagtgatttaacatctttgtgtggaagaggaaatggtggagctgagaactggctcggagcccctgaggcagtagtgagggtctcagacctggaaatttctcaaacctggctgaagggtccagcctcagctacagtgaacgacaaggccctggggcaggagaggggagatgaaccccatagatcacagatatactccctccggtgtccccatatgggcctgccctagacattctgtggagggatgcattttgcatcgctgagctatatttgcacccatatcagttaaataagtggaaatgagttcttgtggatgtagctgtgggtaggaggaccacaggtaaggagcatagacctcagaccaaagggaggatggacggaagagaaacagtcactgccctaatcccggtgggggagccacattcccaaatggttataaagtggaattgcagtttgaagaattaattgccgggataggcttctaggcaagaagaccaaggctgggcgcagtggctcactcctgtaatcccagcacttttggaggccaagatgggcggatcacgaggtcaggagttccagaccagcctggccaatatggtgaaaccccgtctctactaaaaatacaaaaattagccaggcgtggtggtgggcacctgtaatcccagctactcaggaggctaaggcaggagaatcgcttgaaccctggaggcagaggttgcaatgagccaagatcacgccactgcactccagcctgggcgacagagcgaaactacgtctcaaaaaaaaaaaaagaccagtgtggggaaaggcctggagggggcaaagggaagaaatgcagggtctcaggatctcagctggggcccggagtgccccaggcacaaggctgtgggtttacttgattgtggcttctacttctgctttgtctcaggtttgtcctcaccatgggacttcagccacctcattcatctctctcagcctcaatttcttccatcagggtgatcatgttagtcatctcctggctccatctcaaaagccaaagaccagtggggtcctactcatccagccccccaattacatcttcagctgcatctcctgccaccccctcactcctggctccatgatcttgagccctgacaagccccaggattggagctcctggcagggctgcaggcagggatcgagttttcaatggggtctggcatcctgggtcaggagagaagtcacattaacctgggtgttaacagatgaatgagattttcccggtagagaggatggaggaatgcctgatttgagggaggagctgtgcagatgaatagtggctaagagcacggacccgggaatgggaaggcagggtttgaatcccagctcccatacttactgattatgtgatcacaggcgagtgatttaactttttttttttttttttgagacagggtctctgtcacccaggctggagtacagtggcacagctcactgcagcctcgacttcccgggctcaagtgatccttccacttcagccttctgagtagctgggactacaggcgtgcaccaccacacccagataatatttttattgtttattttattttatttatttatttttgagacagagttttgctcttgttgcccaggctggagtgcaatggtgcgctcagctcaccacaacctccgcttcccaggttcaagccattctcctgcctcagcctcctgattacctgggattacaggcatatgccaccatgcctggctaatttttgtatttttagttaagatggggtttcaccatgttgaccaggctggtcttgaactcctgacctcaggtgatctgtccacctcggcttcccagagtgctgggattacaggtgtgagccagcgtgcctggcctattctttatttttcggagacagggtctcactgtgttgcccaggctggtctcaaactcttgagctgaagcggtcctcccacctcagcctcccaaagtgctgagatcacagtcatgagccaccatgcccagcctgatttaacctttttgcctgaatgcccttatcagtgaaatgggcttaataagagcctccctgatgtggccattatgatggtacagtgaattaaatgcctgttgtgaggccaggcgcagtggctcacgcctataatcccagcactttgggaggctgaggtgggcagatcacctgaggtcaggagttcaagaccagcctgaccagcatggagaaaccctgtctctactaaaaaatataaaattagccaggcatagtggtacatgcctgtaagcccagctactcaggaggctgaggcaggagaattgcttgaacccgggaggcagaggttgcggtgagccaagatcgtgccattgtactccagtctgggcaacgagagtgagactccatctcaaaaaaaaaaacaaaccctgttgtgacagcagatgatgaggcctgacccccacccatggccctcctgccctcttgggttcacttgcaactgtagaagcaggttctcaggaggctgcagcctcctcccctgagcccctgcatctctgttgctctgcctgagggcttcctgggagtcctggaaggtgggttaatgtgctcagaggcaaccctcagcctgtagggggcagcagtcactggatgagcgccctggcccacctctcatctggtgggacaacatgtgttctgcagggttcctcaggggcacccatggaatggagccccagttgcccacagtggtgtccactccatgagcaccttttttggcttttcccctgccctgtctcttccccactcccgcttcctgggatcacatcccagataaatcatcacccgagtccttggctccaaggatgcttatgtgtcaagcatggaacagtgcccagttctctgctgatcctctgtgtgcatctgctgctctgttttttgtttgtttttgagacagagtctcactctgttgcccaggctggagtgcagtggcgcaatcttggctcactgcaacctccgcttcccaggttcaagcactcctcctgcctcagccgccccccgcccccaaccccgctcgccacgagtagctgggattataggtacctgccaccatacccggctattttgttttgttttgttttgtatttttagtagacacggggtttcaccatgttggccaggctggtctcaaactcttgaagtgatctgcccaccccggcctcccagagtgctgggattatatgtgtgaagcaccgcgcctgggctgctgttctgtattttactctgctaaggcacagggtcaatgtttctcaatcccttgacccatctgttaaacaagaaatcccctgatctaagaaaatggctataaaagacatacagggattagagtaatttagactacagagtgagttaaaaatagaactgggttgttaaattttctgattttgataactactagaattgtgtgagaaaatggccttgttcttaagacatacacactgaagaatgtaggagtaaaaaggcctcgtgtctgcaacttactctcaaatggttccaaaacatatgcactgatataaatatattagcaagggtatggatggtaaatcacaaggagcaaagtgttaaccactttgaatctgggtaagggcatatgggagtttgttctagttttaaaaggtttcccaacacttggggaggttgaggtgggccgatcacttaagcccaggagtttgagaccagcctgggcaacacagggcttgagctgccatgctcggcctaaattttaaaattgaagtattttaaatgtaaatgtaatgtgaaagtattttgaatgtaaaatattttttgttacacaacttcattgttttagtaggactgtattgcattttacctgttaaaaatttggcatctgaattaagatgtgctgtaagtgtgaaatacacactagatttcaaagacttagtaagaaaaacagattgtaaaagatctcattatttttatattgactacatattgaagtgataatattttagacatgtcaggttaaatagaatataagttaaattattaaaattaatccatttttactgttttaatgtgactgctagaaaatttgtaactacatctgtggctcacattctattcttttttttcttttttctttttttgagacagtctcattctgtcacccaggctggagtgcagtggcgtgatcttggctcactgcaacctctgcctcctgggttgaagtgatcttcctgccttagcctcccgagtagctaagattaacaggcacctgccaccatgcccagctaatttttgtatctttagtagagacggagtttcatcatg[131 bp omitted]gagttcccatggcctgtttcctcactacaatctgctctcatggcaaaattttaacatagtggctccattctactgactccctgatgccttcttcaaccacattgtttgagttgtgcccccttcctcttgctcactttttctcctcagcacttaccaccctgtgacccactacaatttcacttatttcttttagttattgtcaatttccccaagtagaatatcagctccagaggcatcgtcttgttcactgtcgtgtctctgctccttgaccaggacctgacacatagcagacagtcaatatttgttaaatgaacgaatgacacagatatgctccattaccgagcctgttgggtcaatattgccaagactgcaccccctatttgctggtgatctcagggggaccatgcctctttggttgatgccagagtctcagcctggcctttgaaacaggacaaatccggtttgcatcctgacttttccctgaacctggagtctctcccagaatctgcagcttcccccaccccatcagtgtctgttcccctcttctagtagcaacaacttgatactctttggagacccacgcttctgccattttcagtccacatggtttaggtggggctgaccgcagcccccagcaaaggtggagcatgtgacggaagccagaggagccaaccttgggactttggttggaactacaaaggaacagtgactctactattggctgctaaattggtggggtgtgtgtcacagtggagggaggcttagcatgactgactccattttgcccctgacaccctgcagtaacatcctttaggttaaaagcttctgcttagttttgtgtgtagatcagctaattacaggaggaatttagtttatagctcaattttagaaaaaatagcagtccctttcccaaaactaaccaccccaccaagagatcaggaaactgtacacacaagtaacaatgttatactagagatttacaagaatattgtgacctgacctacatcatcaaagaagttttcttctggactcttgctggcgaccagatgtctgcagtcattggtcacctaacctcaacccccttcccttagcataaaaagaaacctaaaatttatactaagttgagatggttctttttttttttttttgagacagagtctcactctgtcacccaggctggagtgcagtggcgcaatcttggctcactgcaagctccgcctcccgggctcacgccattctcctgcctcagcctcccaagtagctgggactacaggtgcccgccaccacgcccggctaattttttgtatttttcatagagacgaggtttcaccgtgttagccaggatggtctcaatctcctgaccgcatgatccgcccacctcagcctcctaaagtgctgggattacaggcgtgagtcaccgcgcccggccgagatggttctttaggacactagtctgccatcttcttggtttgctgtctctccaaatgaagttgcttgctttttttttttgctttttttttttttttttttttgagacggagtcttgctctcccccaggctggagtgcagtgacacgatctcggctcactgtaccctccacctcccaggttcaaaagatttgtaaaaatacaaacgttagccaggtgtggtggcgcatgcctgtggtactagctacttgggaggctgaggccagagaatcaattgaacccaggaggcagaggttgcagtgagccgagatcgtgccactgcactcaagcctgggcaacagcgagaccctgtctcaaaaaaaaaaaaaaaactagcctggcatagtggcacacgcctataatcccagctactctggagtgtaaggcaggagaatcgcttgaatcctggaggcagagtttgcagtgagctgagattgtgccattgcactccagcctagggaagagtgagactctatctcaaaaaaaaaaaaagccacaacttctttgtccctagggtacaaccagcaatgggatgacaccccaggtgcccagtgcagcaaccagtaactcacccagtattggctttctcccttcctgagctcacgtcctggctcccctgccacgcctaaataaagaactggtgcttgactctttgtgtcagggtctggggcagccccacccaagatgggctgatgcagttctgtattctgttctcaaggcaaaagggtccatccagacatatccaggccacatcctagattccgggtatgaaggcacctagtatcttcacacatcctttgacagtgaccatttattacacacatcagactgggggaagaccattgacatagctgagcaccaggtagggtgtcctgggtattcgggcatgagagcagcaggggcctcctgacgcgggcaggagaaacatggcacccaccaggaggaggaagaggaggaagaggataaggaggaaggtcagaggctgcctggatgcaggatcgggggccctgtgaagggaaatgcagtgttaaacatacaggtgggctgctgctaggagctctgtcccccacaccctagtcccatctctcaggcacctcaccctggattcccctccagcctcacatcctggagatgaggagatgcttgcctcttcttgtcctaaggagggagagcagccagcagcagaatggatagaaatgatgctttatttgtttatttattttgagacggagtctcactcttggcacccacgctggactgcaatggctcaatctcagctcactgcaacctcagcctcccgggttcaagcaattctcctgcctcagcctcccgagcagctgggactacaggtgccaccatgcccagctcatttttgtatttttagtagagatggagtttcaccatgttggccaggctggtcccaaactcctgacctcaagtgatccgcccacctcagcctcccaaactgctgggattacaggcatgagccaccacacctggccgacacattattttttgagacagggtctcagtcacccaggctggagtgcagtttcacaatcacgactcatggcagccccaacctcctgggctcaggtgatcctcttacctcagcctccctaatagctgggaccacaggcacatgccactgcaaccatttacttttgtttaatgatttgtagagatggggggagggggcaggtctcaccatgttgctcaggctggtcttgaactcctggccttaagcaatcctcctgccttgacctcccaaagtgttgggatcacaggcgtgaaccacggtgcccagccacaagtgacactttgtgtcacctttaccctactacgatagacctacaaagctggtcttatttcttctcctttcctggcacctccttatccccaggaccccacacagacttggaatatctccaagtgtagtggatgtctggttgtgtctgtcctttatccaatacaatccccctttttctgataacagtgccttaattggaggtgggcggctgtcatgccttccactcccagaccttcaggttcaagtgaagctgacagccacctccccaacttccatgattggtgtgacccagacctggccaatctgagcactctggtttattcaaggtgcagcccatgaccccatccggtaagtgggagtcagccctgggactttggcagctgtcagtagggtcggaggcatgctccttcccctggggtgggtaaaccagtgggagtggcagtgtagccactggagcacccattttgctaagaaggaagccaccttggggacttagagcccaagaaagggagggactgagccctgatgttatttctttctttcttttttttttttttttttttttttttgttgagatggggtctcactatgttgctcagactggagtgcagtggtgggatctcggctcaccgcaacctccgcctcccgggctcaagcgattctcctcctgagtagctgggattacaggcatgcgccaccacacctggctaatttttgtagttttagtagagacggggtttcac[140 bp omitted]ctggacctttccattactttttttttttttaatagcattccctttcttgtgccttttgatttcttgggtttctgtcacttgccatcaagattcctgagtgctacacctggttgagaactggctcacctgaggcttccggagcagggagtgtctttggtgacgtgctaagcgtttctggtggccgaggccagactccagcatgtcctgtcgggagtgagaggtgtctgcttcctggagaaccagcaacaaagaaaaacgtggttgggggagggccaggatagggatgtcatagagatgagattctgggggagcagagagatctcacaggacagacaaaggcagagccaaagaaaccaagagaggagagaattatttattcattcattcaataaatgtgtaatgagtttctgttacaagccaggaactgttctaggagctgaggacacagtggggatggaaataggcaaattcctggcctccgtggagcttatatttgacaggagagagaccataaattaataagtaaatgaggcctggtacagtggcttatgcctgtaatcccagcactttgggaggccaaggcaggcggatcacctgaggtcaggcgttcgagactagcctggccaacatgatgaaaccccatctctactaaaaatacaaaaattagccaggaatggtggtgcacacctgtaatcccagctactcgggaggccgaggtaggagaatctcttgaacctgggaggcagagtttgcagtgagccaggattgcaccactacactccagcctgggtgacagagtgagactccatctcaaaaaataaataaaaatttttaaaaataagtaaatgtacaaagtcaagctgtggtgagtgctgttaggaaataaagtaagaagataggagtgctcatgtttggaggtcacgacaggcctccctgaagaggtggcacttcaggagagactgggacagtcaggaggtgagtggggcatcatctgggggcctcaggataggagtgaatttgagatggggcttgaggatgtagacagagacagacgagagagagaaacagtgagatagaaggagacaccgagagacagagatagagggggagacagagccactgacacctccttggaagggcaggatcttgctagaaggtgcgcagagatgtccccagggtgcctggcagaaggtccctcaagggggtctgctctcacctcaaggccttgtcccctgccctggggccccctctggccacacagctcacagggcactcctagtgtccgggctgtcttttgtcccaagggcccaaggcccccaatgtcccccgccggatcccactccaactctgtggaagtggggaggctactgggtgcccagggcccccagaccccaccaggtcctggccagtccgagtctccctcgacctccaagtcctggtccagcgtgttggcctcctcgaacacctgggtcaaaggacagaggtcatggaggctatgaggttggggcctgggttgggtggggggtatcaagatgggccctaccaggctgtagctgaccagctgggcctgcagctgccagagccgccggaagatggagtctcggtaagctcccagggcccgcaggatctgctccagggctgcccaggccctgggctcactccgctgtgccagcccctcaccaaacgctagcagcgcctccacacgctcagctgcccctcgtaggtccacctggagggcctggggacatatggacatcaccccacgcacacaccagggacccaaaacctggagttacccccctcccccatttcctatccaaaggcctggaacatgcactcaacccatttcccatcccggaaagctggcacccactgctggggccgtgcccacccccacatcctggcctctcctgcctacctgcagctgcaccatcccactctgggccaatgcccagtgccccaggccttgctccaggtcctgcagccggcggcccagccccagcaggcacaggtgcaggctgttctgctcagcctctagtacctccaggccagaaatggggtgctggggaacacaggagccaggtcagggccagtgggccaatcaagatatcacccctgctcccatccccacccctcttctgtaagcttctggaaacttctctgtggcacagtccatctccgggtctgtctgcaccaggatggctcccactgggggggccttcccagtggagccaggcctgaggacagatatctagttcaaggtctccaggttttcaaagctcctggaaacttggatgtgtgaggcctggggggtctggacagggagcggggctgggtaccccccaagaagaatggggctacaccaggagcaatgatgaaatgcttctcagccgggcgcagtggttcacatctgtaatcccagcactttgggaggccgaggcccgaggatcacttgagcccaggagttcaagaccagcctgggcaacatggtgagacatcatctctacttttttttttttaataaaaaagaaatatggctggacacggtgacgcacgcctgtaatcccagcacttcgggaggctgaggtgggtggatcacctgaggtcgggagttcgagactagcctggccaacaagtcgaaaacccatctctactaaaaatacaaaaaattagccaggtatggtggcatgtgcctgtaatcccagctactcgggtggctgaggcaggagaatcactgggacctgggaggcggaggttgcagtgagcagagatctcaccactgcattccagcctaggtgacagagagactccatctcaaaaaaaaaaagaaagaaagaaatacgtctccccagttggtcagatattgaaacacttttccagaaggtccctccccctacagacacccaacacctttccagaatcatcacccggtcctcagtatggaggccagactccaggggacagagaggaggtggggctggcacaaggggtctgggtcacctcagctcacctcacagtgtttgcccccagctgggtcctcgtaggaagagggtgttgaccatctcggggggtgagcggcaggctcattgccccttggcccaccctggaagtgctcaggagggcccaaggagtcctgtcccagggtctgggcctgctctgggctaggaggcagggggcggtgactgggtgagtctcgacacctcacttttcagcctaccgtcaccccaaccctggtggcctctcctatgtccccaggcgatcacagccatggcacctcctaccctcacatggcccctgccaccacgcctacccttttgggaacaagcttccaaagccccggcccccacctcgtgctctcctctccggacgcggggcagacggtgcatccaacaatgtccgcctctctaggtgctcccggtgggtggttgaggggctctgagccaagtctagggcccagaggcagggacagggccatggctgggggcctggggacacaaagtcaggtgagggcagccagtaagacctcttccctagacaagggtgtcccagagctcctccgctggagtcacccgggcctgaggctgcaggagaggcccaggacaggtctggctccgccccttccaagaggaacctggacccggccatttgatgcccagctcaggtgacagaagagtcacttaactccttcctccctagcaggccagtagctaaatctcccagcatcactccacgccatccaagagggttccagatagaacccctgcgccacctcctcaagagccctggattctgccccactgggaacccagaaatcggacctccagggcctaccccattcatttaagaccctagatgccgctcccctcaggaaaccaagcatctggcccctaaaaaataaaaatataaaaccaaggaaagatttttttgtttatttggtatggggtcttctgtagctcacacaaaattattgggaaaataaataacccaggggagccccctttgcccacggttcctaggtcgcggagtcacagcagccccaaaggggcaggaacctgggaatccgaggggtcccggccctggcggtcacttgcccagcaggaggccggcgcgcagcacgcggggcacgcggcggatggtcagcgagacccgggtgccgcgcaccaggcaggctcccggccgcgccgacgggcaggctgccgcattgggcggcgaggaggcggcgtccagcgcgtctacgcgggcggcggcgatgccgtggagaagacgcgtgtaggcggggccgcggagcaccagcaggctgcgcggttccagcagtagcgaggtggtgggccggggcggaggccgaggctgcagggcgggttgagggtcagcagggctcaagaagtcggggggtgggggtgggcgagaggtcggtagcctccggggatcagctagtccccaggggcaaaagctgaagagcaagtgtgctcacaatgatggaggctttggtggttcaggagtgaaaattgctggggcctgggctggggctgctggaaagggagggcgagggctctgccgtccctcgggagggggcaggatctaggtggcagatgggggcgtcaaagggtcagcggccggtgggagctgcagctgggatctcaaaggggctgaggctggggctgggacccaggaataggcagtccccaggaaatacaggcagagctgggctgagagagcatggctgaagccaggaccaggtgaggagagagtgaggcagaggttagaggcagtgggggttcccaaggacatcaggacattagaggacaaccgcacagctgagggagtgtcagagcatccaggagcatgcagggctcgagggcaagcctcaaggagtgggtcggcgtgttcaggggcgtttctgtgaacactggggtgctagaaatgcatcactcagagaaattgtgtcaaggggtcaaggagaatctgggggtgtcctgcaccccaaatcacattcctggagtagcaggacgtctggggcaccctgagcaggggcagatagagcatctgggaggaggtgaggccccccgagttaatggcggtggggtatctaaggatatcagtgtctgctggggagtcaggggtatccattcagcaggttggggcatcggggagcctgtgaaaatcatggcatgtgggacagacaccctgtaagcagatgggttgggtgtctgggaggaagtgggtacaccccatgaggggacaagggaaggtatctgggagagtgccaggagtaccccgaaggcatgtgggaccaggtcatcttggaggatgtgcgaggttgaagtgcctacaagcagctggggcagtgtctgggggcccacctgttctgtagggtcatcgtcctctggccgccgcggctcgtagaagtccagcacggtgtgggagcccaggctgatggtgctgacagtcgggtagtacagtggtccgtcctcgtggggctagggagtgggcaccagggctgggcagggcaggagtccacaacccccaccctctgggtcaaaggggggcttcccaagccagggacagggaggtgaatgcctgtttgggagatgtggctgcctaatgagtgagggtgggtacagagtcccctgccccagcacagctcagaagtctgagtggggggacacgggccgagggtgtgtggttaccatgatgccctccccaggcagatactggttcacgaggacatggttagctgggaggcctccaaagaggctgaggtttgacactttgtccacgtagcgctggagccatgggggcagccgctcaggaaccatccctcggggatgaggaagcccacctggggaaggcaatggggtcctgagggcccccctatagcaatagatcccccattagggattccacagtggctggaagcaccctgatcctctcagggacccctgaccgtttggagatagccactgggtccttcagaggtttcctcacttctccagaccacaggtccctttcagatactcccaactcatcaggaaatccctaatccctcaggacctccactgaccccttcagaatcctcctggctcttggggccccttgagctgtcagggaccctctgatgtcttaagtctattggacctgagtcccctgccccagcctacatcccagaatcactcctgcccccagccagggatacttaccccagttctgtaactttctcccagagagctgggtccactttggctttggggcattaaaaacctaagaggtgggaagggggtcactcctttctcaggatcacccctctatgatcctcccacctagaccaacataggggcctttacctccgggatggaaatgggtcatctgtgtctgtgggaccattccctggggcggtgggttcctaggattttgtggtttgccttttttcctgggaacgcctttggccccaaagcccacctgtgtctaccaggatttaggaatcagggctgcacaaccgtggtctgagagttgtgggtctcacaatctactcagagttctggggctggacagggctctttcagcccagcaaatagtctgcattctaatttcctgattccgtgccaaacctggttgctcatgcctgtaatcccagcactttgggaggccgaggcgggcagatcacttgaggtcaggagctcgagaccagcctggccaacatggggaaaccccgtctctactaaaaatacaaaacttagctgggcatggtggcatgcacctgtaatcccagctacttgggaggatgagacaggagaatcgcttgaacctgggaggcggtgtggtgtcacacgcctgcaatccaagctactcaggagactgaaacacaagaatcagttgaacccaggaggcggaggctacagtgaaccgagatcacgccactgcagtccagcctgggcgacagagcaagattgtctcaaaaaacaaacaaacaaaaattcctgattcctgggctctctgaggacagtttgagttctgcaaccgacttgttcctattgcctgggggagggagtatgcaaagctgggctatctcagcacagcaaagaaagtactttgaaaatcttccactgccaagatcctaatgatctagaatgggctatctcagtccaacaagtctagctctagttgataatctactcattcccttcatggttatggagctgtactgggctatttcagcccaggaattctataatatgtagatttttcaatgccaagaacgcaaaggtctggaatgggctatctcagcaaaaaagtctgtgttctgtagctaattttttcctggactcaagatcagtgggttactccaacacagggaagatctgtgctctgtaacttaggcactggggctgcaaagggcaggaactctgagctttgaaaattcttctttccccaaaccttaagaacagaatgcagactgggccatctcagcgtagatggtctgtatttggtaaccttattgtgctctgggtctatgctgggctattttagcacaggaaagagtttactgggctatctcagcacagaaatctgaatacaaaattctttactccccagtctcaatgatctgaactgggctatctcagcctatgtttataaccccctattctctaagctagcaggattgggctatctcagtagagggagtatgagctctgtaacttccttgttccttctgtcggggtcttcactgcagccttgggggctctcatacagaggatggacattggggaggaatatgggaagagtgggaaaacagaccagtagggcactgaggtcacctgtcgaagcaaatactcctcctcttctttggagatgaagtcagggacatagtagattacaggtggtgcctaggatagaaagaccccctgaaggtgtggcccttcaacccacacagaggacatatcatcacagagcaacccctatgcctggagacaggctcaggatgtcctcagacaggtcagggtctaaagtcaagggaccagtgccattccagaatggactctgacagtaagaatgaatttggtggaagggggcagtcccaacccaagaactcaggaatcagcctgcctccttcaccctctgcaccctgagttctgacaacctgctccactctgaacggttccagggctgggactctggcgtcctgctcctccatcaacaccaactccttgcacccaatcctgtagggaggggaggacatactgaagtcactaggcctcccgccctaacaccatgatgcagcattccaccccatcacaggccaggcctcacctcagccctcttctgaaacgcacttggtctctaaaatctgagtcttcagcatcttacaagccacacagagagcccctacgttccatgcccggacacaatgagccccaagaataatcccccattactctgtccactaagggcccatccaactacacatatgccttctcaatcctcccacagagaacattctctggccccacacacagggagcctttctcaaaagctctacacatagcccccagggctgcactccagagcccctttaaacaccttgagaccccgcttcagacctgcaactgtgagcccggctatcaacactcagcgacccccgccccccaccgaatcccattctgtgcactcctgtgaccccaatctgagcctcctcagacatgtccaccctcagcctcctcggatccccccatttggacgcccctcggatttcccctcctgagcgccccttcactccagcaccctgagatctttagctctgaggctgactcccaaatcttcttccctccctgaaccattcagatccccgactccgagccttttaggactccaagctctgagcctcctcggactcctactctgggctcccccggatccccactttcagccctattgacatccatctctacccccagcactccccaaaactgaccgtccaccagcgtcccctccaatttccaaattcaacatccccatccccctcccagccatttccgccccacattacagacgcagagtccgcaggccaatgggagctcccagaggcttcaagggcccgccttccacccaatcggcgctctcactcagtattcgcccgcccccttcatgctcgcctaaggataggccgcgcctcctggcctctgagccattggcaggagggcgtgggcggggcatcgtcgtctggcactggccactcagaacttaggaactgaacctggccattggcggagtggaccccgatgggtgggacgggggcggcagccgtgacagccgcgggaagacatgagaggctgctagaaggacttcccgcggccagcgccatcacctgcccacgccgcagggaggtgagactgaaggaagcacttcctttcccgtcttctcccagcaagggaaacccccaatgacccgacacagagaggccatagaaacgtctttattgaagaggacaggagtcatgctgagtttggggacatgcagtgaaggggcagtcgtgagctgtccttggtggtcggggccccaggtccgccctggaccccctgggccttcaggttctccctcgagctgttggtctggcccaggtgctgtggggtcctttgaggccagtgactagaacgtagattgaaatcggggttccaggatttgagatcccctcagggccttggggccttccatttattagagatggaggctttaggatttggggttcccttagggctggggctcttggaatttggtgtcttgaaacccatggactcggggcattgaaattctccagtttccagggatgggaattcctgtgtggggtttcctggtgcctgtgaatagggcttgaggtgtctgggagcctggaatgcatatcctgactgcagtctcctccataccaggcacaaggacctcatgattgggtttcctggggacttgggattggattttcaaatttgggattccctggggatttgggattccatgatttgggggtcctaggagttacggcattggggtcttctaggggctgtaggacttgagggcacaggggagtttgggacgtgtgtactctagggtttgggatccccagagtcctagaatggggcctccaaattttggggtcccccaaagggggaagtcgttacttaaaaaatagagaattttctgggagtctggccagcacaggagctgtgggccatgtggggtgggcttcatacaaggcactgggggtttcttgagggtgcagagggtaggaagacttggggggtcctgtaattagcacttccaggactgttttggtgtctgtaaattaggggtgacagtgggctggttatggtgggtttcttcttgagggataagaacaagggtctttgttaatgaaggaagtctctgattgaggggttggaatctaagggcttcagggtgaccatggggtcacgacatcttgagaggactgatgttaaatggggaacaatgacatgaatgtctgttactcttttgctttgggggtgtgacctatgtttatttcaagaggacttaaggggcagtgtttgttaatggggaggtttctgatccagggttgggtgattcaagaatgttctgttgtaatgcattatgtggagagggtcaccatcatttggggtgatatggaaatctgttaatctgggaatctgctctgaggggttggggatagggactagcctgaaggtgctactcagggaatctctttctgggtgacatggggtctgtatttgggggttattatgggagtatctgttaataatggggcctcaatgatcgagggctggctaacaggggtctctactctggatgtgttactgggaatctctatctcagggtgactcagggctcctcgggtgtcaggagatgctagtggggactctgtctctttgtcaggtgtccagggcctctaagactgcatctccgccctcagcatccaggggaaccagcagcagaacagcaacctggaaaggaggatgacagggtcacgcccttaggcaggcagcggggacatctgcacccatcacccccagcctttcccccagtgtttgctatcaggcctttctggattctgcctctacctctctggctgtggtttgtttgtttgtttgttttctgagatggagtctcactctgtcacccaggctggagtgccatggcacgatctcggctcactgcaacctctgcctcccaggttcaagcaattctcctgtctcagcctcccgagtagctgggactacaggtgtatgccattgtgtccggctaacttttgtgtttttggtagagacggggtttcaccatgttggccaggctggtcttgaactcctgacctcaggtgatccgcctgccttggcctcccaaagtgctgggattaaaggcatgagccaccccgcccggtctctagctgttgttctgaggctcgtatggagtgaagggtgttctgcttcctttaccggcccacccgaaagtggaattcactagaattcagtgcggggccctacaccctaaagactgtttctgggtatgcttacaagtcacaagttttcctaacctctctttccagccctgaccagagctccagacctctgggtccaactgccttatggatccctctccctgaatgtcacataggagaggggacaggggttggccacacacctggaaatggagttctctgatgcaatgtcctttggggtccggactgtggtgaaggtgcgtttgggctgcgtcactgaagaggagggcaggatgtcaagtgaggggatgacagaccacctgtgtcctcaatacccatccagaccccttctcattaatacctccccatgtctccagtccccacctggatcctacattcccaatacccatctgggcctcttgtccataattcccaccatgtcccccagtgactatccctgtccccagtatctgctcaacctcatgtccccgaagagccttgttgctaatttcctcatatcctctagcacctatctttttgtggaccttgtctcatcattttcctggaccctgtgtccccaattaaataccagagactgtcaccagtatatacctgagaacccatgacccttcctcccatccccaaacgtacactcctcccaacatatcatcccctaactcacttgtcacttgatgcacttttttggctccaacgctgtccccgggggaatcagtggatccgccaatcctgaggagacacggggagggggagaagtcagagccacaaaaggccagggtctgactgagagctgggccccagggatctatgaggaaagggctgggggctcgggggtgtccacactgtcctgctggtctgggaggaggaggccatctgaggggggatcagggctccaggtggtgccctgggtttgggctggaagtttgggctcacctctgaatacgggatgctggtgcgaagaccccatgcctcggggggcaagtgaagtaccggacaccgaagacagagccatcatgcttgcctgtgggctggtccagctcaatgccataccagtaacctgcagcacgagggtgtcaggatttctcaaggccctgcctgcctcccggcccagagtccccatcctcacctggggcaaagtctgtcttcccgtagaagcgcacgatcccctgcttctggcccgcgacaaggacctggtctccaacctcagccttggccccgtcacgctgctgcaagctgcccagagatggggatgatggggtcttcttcttgcctaagggtagaaggtgtaggaggtgggtagtggggctgaggccagctttgggaacctcgtgccacctggaaaaccccaaggtagaaaaccctgttcttcgtttgaagtgaaactgaatcccagatgccagagaattaggaaggggctttaggcctgaagggaaactgagtcagagaacctgaagaaccccaaaatcctttctcaaagctgaggatatgttggataaggaaaagctgagtcagaagtcaggaacccagaaactgtccttttaaaatgaagggaaaattgggtccgagagtaaatcaggccatgtgcagtggcgcaggcctgtaatcccaacattttgagaggccgaggcgggcagatcacttgaggtcaggagtttgagaccagcctggccaacatggcaaaaccctgtctctacagaaaaaaatacaaacattagccagatgtggtggtgggcacctgtaatcccagctactcgggaggctgaggcacgagaattgcttgaacccgggaggcggaggttgcggtgagccaagatcgtgccaccacgctccagcctgggcaacaaggcgagactcttgactcaaaaaaaaaaaaaaaaaaaagtagatcaaatgacaaaagacaggatctccaaggattcttccctaaaactgggggagacctttgggtctgagaggaaactaagtcacagagggcagggaacccacaggtccttctaagaactagggggtgccagtactgagccaaaggggaaactgagtcacagaagtcaggaactcagagcttgtcttccaaaactggagtttgggcctgaggagaaactgagtcacagaagctgagctacccacacaacatccccaaactggctcttcccaccacagggatcccctctctgacctttgtgttccctgcggcctttgccggtgacacgggagaagtccatccggggggtccggggtgtggaggtgacagaggaggggggtgcgtccactgccttggagatcttggacacggaggcaaagagacctaggggtacagaatccgagcctggtgttgtccaagcctctgccctcggcccccatcctccatcccctatttcccagtcagcagcatcagaactgccgagtggacacccagccacacccctcttgggcccgaggtcggactaaccctgcttgggagggcagatgaagtaccgaacgcccccaacgctgccatcgttcttgccctcaggttcgtccagctccacgcccacccactggccgctggcaaactccgtggtcccacagaaccgcagtgtgcccgtctggggagagaagggaggcgatggctaaggaaggaatgctgggaggccaacgtggagtgcccacacacgggcagcaaggtgggttgcatgaggccgccctgggcccaaaccccaggtcacacatcaccatttgctggctacatgacttaacctctgtgtgcctcaacttcctttgctgtgaaatgggaacagaaattatactcaccttataggattgttaaagagttgccctgtctcatatagtgaatagtgactagccacataggacaatgtaaatttatttatttatttattttatttatttttttttttttcgagacagcgtctcactctgttgccaggctcgagtgcagtggcacgatctcggctcactgcaaattccacttcctgggttcaagcaattctcccatctcagcctcccaagtagctgggactacaggtgcatgccaccacgcctggctaatttttgtatttttagtagagacggggcttcgccatgttggccaggctggtctcgaattcctgacctcaggtgatccacccgcctcggcctcccaaagtgctgggatcacaggcatgagccaccatgcctggccaacaatttaaatttaaactaaggccgggtgtggtggctcatgcctataatcccaacactttgggatgccaaggctggaggatcacttgaggccaggagtttcagaccagcctgggtgaaaatggcgagaccctctaatcttaatctgttccaaaaaacaaagacagcaagaccctattctctataaaagaaagaaaaaaggtaaccaggtgcagtagctcaagcctgttgtcccagttacttgggaggctgaggtgggaggatcgcttgagcccaggagttcaagggtgcagtgagctatgatggtgccactgcactccagcctgggcaacaagcaagaccctgtctcaaaaataaataaatacataccttagaaagaagactcagatgatttttaaatttaaaaataaataaatttagtccgggcgcggtggctcacacctataatcctagcactctgggaggccgaggtgggaggatcacctgaggtcaggagttcaagaccagcctggccaacatggtgaaacccccatctctactaaaaatacaaaaattaaccaggcatgatggtgcacgcctgtaatcccagctactcgggaggctgaggcaggagaattgcttgaacccaggagggttgcagtgagcccagatagcaccactgcactccagcctgagcaacagagcaagactctgtctcaagaaaaaatataaataaataaaaatacaaatcaatacatttaaactaaattaaaaatgcatttccccagtcacactagccatatttcaagtgctcaattgtcacatgtagcttgtagctactttactggacagcacagacagaatatttccaccattacagaaagctctgttggacagggctgttatagagaaattaaagccctcagaacagggcttggtattaagtaaaggatcagcaagtattcgttattgaaattttttttctattttagagacagggtctcactctgtggcccaggctggagtgcagtggtgcaatcatagctcagtgtaaccttgaactcctgggttcaagcaatcttccctcctcagtctcccgagtagctgggactacaggtgaacgccaccaaagcctggctaattaaaacaacaacaacaacaacaaacttttgttaaaaatagaaatggagtatccctatgttgcccaggttagtttcaaactcctggcctcaagcgatcctccccatcttggcctcccaaagtgctgggattacaggtgtgaagccactgtgctcagcctgttagctattatcatgctgtaactttggtcaggggacttattgagcctcagtttcatctgtaaaatagagatagtaagccacctcatggagtgatcatctggcggaaactttttttttttttagacagggtctcactttgttgcccatgccaggggtgcagtggcacgaccctggcacagtgcagcctcaaactcctgggcacaagtgatcctctcacttcagcctcccaagtagctaggactacaggtgtgcgccaccatgcctgattaattttttcattattagtagagatgaggtctcaccatgttgattgcccaggctggtcttgaactcctgggctcaagcgatcctctcacttcagcctcccaagtagctaggactataggtgtgtgccaccatgcctggttaattttttcatttttagtagagatgaggtctcac[131 bp omitted]agctgcagtgagactttagtgagtgtggttattatcattatgggaggctcattcacctctccatgcctcagttcctggtccatataataggctaattaattagtgctgatctttttttatttttatttatttatttttttttggagacggagtctcacactttggcccaggctggagtgcagtggcatgatcttggctcactgcaagctccgcctcctgggttcatgccattctcctgcctcagcctcctgagtagctgggactacaggcacctgccaccatgcctggctaattttttgtattttttttgtagagacgaggtttcaccg[132 bp omitted]ctagaacagtgcctggcacacacaaagagcatttagtatgcgctggactctgttctaatggccttacgcattttaattaatttaaacctcaaccagccccctaaggtggttactattattatctccatttacggatgaagacattgacacccaaagaggcagaatcactggctccaggtccacaggtgggaagttgcaaagctgagatttacctgggcaagtccctgagcctgagttcatgacgctgtgctatgctgcttctctaaggggcagtgattagtattccgtgtcttcagataaaggttttcacctgttggagcctcttatagtctggcttgtaaaatgggaagagtcaacccaaccttccttctgaattgtgcaatggatatgattagatcgtgcacagcagaatgctttctggatggggccgggcgcagtggcttatgcctgtaatcccagcactttgggagccaaggcgggcgaatcgcttgagggcaggagtttgagaccagcctg[185 bp omitted]atggtggtgggcacctgtagtcccagctactcgggaggctgaggcaggagaatggcatgaacccaggaggcagagcttgcagtgagctgagatcgcgccaccgcactccagcctaggcgacagagcaagactccatctcaaaataataataataataatcataataataaaaataaacccaggcttgttggcacacacttgtaatcccagctacgtgggaggctaagacatgagaatagcttgaatctgggaggtggaggttgctgtgagccaagatcgtgccactgcactctggcctgggtgacagcaagaccctgtctcaaaaacacaaaaacaaaattcaaactccttccagtagcctacaggtctgctgtgacccagccttgctgacctctccacctcaccgcccttcccataactcccctcgtcaacactgccccttcctgcctctgggtctccatacctactgcatcctctgcttccttatctttgcaaaggaagttctttcctatctcagtttggacatcacctcctcagagaagccttctcagaacaccccagctaaaaccactccagcattcagccagggacaatttactaaatccaaacatgtaatggtgttgacagcccttgttgctaccagaaattacctttttttttttttttcaatagaggcaggatctcactatgttgcccaggctggtctctaacaactcctgacctcaagtgatcctcccacctcggcctcccaaaatgccgggattagaggtgtgaactaccgtgcccagcccagaaatcatctcaaccataggtttactttcttgactgtctccccttcattacaagtggagccccatgacagcagggcgggggcagacacagccctccctccctaaggacagactgggtcccgtatggagcccaagggacaccgggaaatgagtgaaattggagtccctggataaatgaagattctctctgccctctcagctgtgatacccgctcccccaagctgagactcctttctccctttctttccctggcttgctcctccacatctgcaatttgggtacattccccatcacaccccaatcactctggcctggacttgcctagccagacttgtctctgagagcagaggggcctgatcgaggaccacaagacccggggggagccacaggtgcacagagctgcgcagatcactctgctcacccctccccatggcagccatgaccactctcggccgtcactgtcagatgacgggttgtttcccaccctggatggagagctcagcacagggtgaggctcaaaggagacacccacggaacaactgagataaaatcaagtactgggtggatagttagggcggcaagtagacaaagggcagggactgcactctgcccgaggacgcagctccaagggattaaggggctgagtcccacccccacccaccatgcaaacacacatcccagcccctgaccttctggccatccagcagcacgcggtctcccaggcgcaagcccagtgcgctaagcatgagattgcctgggacgttgtcatagttgggtagcgtgaccttggggagggcgcaagatagtggcactgcctcttccagaagcgtccgcagctccttggccaccagtgccgcctctgccttgtccagggacatgtccataggatctgggaccacctccgccggcacctgtccttttcgattctgggggccaatgggaaaagaaggcagggactcagtggcacaggtcacacccccatggaggccctgcccctagagaccaccagtctgggtgatgcaggggtaagactaggtcatatcctgggccaacctgggaataagaagggtcagggcaaggcggggtaaggtggctcacgcctgtaatcccagtacgttgtgaggccgaggcaggcagatgcttgaggtcaggagttcaagaccagcctggccaacatggtgaaacctcgtctgtactaaaaatacaaaaattagccgggtgtggtggcgtgtgcctgtaatcccagctactcgggaggctgaggcaggagaatcgcttgaatccgggaagcagaggttgcagtgagccaagatcatgctactgcactccagcctgggtgacagagcgagactccgtctcaaaaaaaaaaaaaaagaaggggcagggcagaaaggtgcagaccacatccccagggaaacccacccctgagacccagggctgggggtgtgtcaagtaattgagggtgggcctgggggtgtaggcagtagggatgagggccacacttcagtgctgtaggtcacgccctcagggaggcaatctctggagaccccaagcctgtaatgaggacatgtgggagatgaacattgagaatgggctcctgtgggctgggtgcagtggcttatgcttataatcctagcaatttgtgaggccgaggtgggcagatcacctgaggtcaggagctcgagaccagcctggccaacatggtgaaactccatctctactaaaaatacaaaaattagccgggtgtggtggcgcatgcctataattctacctactcgggaggctgaggcaggagaatcgtttgaacctggtaggcagaggttgcagtgagccgagattgcaccactgcactccagcctggatgacagagccagtctctgtctcaaaaaaaaaaaaaaaaaattagagagagtgagagtgggctcctgtggtatagagtcaggagtcaaactctgggccagtggaaaatggggagaggcagggtctcaggggcacaggccatgttaccccaacatacatgtgcctggacggctgcagggtaattagcattgtggatggagcctggtaatgcataggtcagaggtcaaagatcatattgagggcttaggagaggaccaaccctctcattcacagaaggcctagcccaactttcctcatgaccttgaaatgctgttatgcactgccatgggataggctggatgaccctgggcagatcccttaatctctgcctcagtttccccattgtaaaacaaggcttataatagacttcacctgacatgtaatgaacactaggcatatttcagctgttattgcatttgctgaatgtacagacggcatttgtagtatttggggagtcacgggaaacgcagagacctgctggagggaagtgggggaggaagggagcaggagggtaacgggttctgggcaagggtggcagtaccctcagcgcagggttggcgccgtgctccagcaaacatttggcggcgcccaggcacaggctggaagcagcgatgtgcagggctgagccgtggttgaagtcactgcacgtggagttcaccactggaagtgggcaagaggaggggttccgggtgagcgcctgtgggaccccagccctcctcccacctcggggctcatctcttaacttgcaggtcccagagcctccgacgcagagccccgcccccacctcggagcccccctctcccttggcagccccgaccctccctagagtggtagtccctgagccccctctcccacgcctccaacctcccgctatctcctcagatcaccgtcctccttcccctcgcagcctggcctcacctgggtctccgcgtccctcacccaggtccttgccccctcccagccagggctctcctcctcacctcgcggcctcgcacccttcagcagcacacgcacgaggtcgggcacatcaaaataggccgcgtagtgaagcgcgttcatgttggtccagcggctgcgcagcgtcacatctgcgcccagcgccagcagctgctgcgagaggcgcacggctgccgcggggtcccctgcgcgataggccgggtcagcttggaacccccattccagagcatgggcccagtgcacggggaggaccctgggcttcagggactatactttgggatccgaagcttcgggttccagatggggcctgagttctgggtggttttcagcgtgttgggtctgggggcctaggctttggggcttatgacttgggggtagggggccctcaccgactccgtgggccccagctttgcacgcatagtggagcagtgtcatgtcggtcagcccgtcacgatcgttcacatggcagcctcggcgcagaatctgtgagtaccaggggagcagggagggtcacccacacatgtggggaaccgcatcccctctccccctggtttccccagtgttctcacctcattgccgatgacgtctatcttgtgctggacttggggcacccactggcgcacaatggcaaacagctcggggatggtggtctgagggtcaaacaggatctcctggcacgccgggtcattgggatcgaagaaggtgaaagctggggtggcaagaggtccaaggtcaccccacgcaactgaccccctccttccagcctcagtaggggagctgtaggtctttgccttttagagcctctaatgcagggtctcaagctggtggcacatgggccacagtcaacccacaggcattttctgtgtggccagcatgaggtttcaaactcaggtgggttcacataaaaatctcgatgcccagtgtgtcttgaaaagttggaagatcaggcaattcccatatagcagcaaactccaccccctgaaacaaaagcctgacagagagtgcagtaccttggagtctgcatgtccagggggactgctactgacctcacccactgttgccctgtgagagtatgagtgaagtttggctgaatctccagagcaaaaataaataaagccagaagtcctggtttttaataaaactctctcaattgtttcaaataccatgcagtccacatcaaatgtatccatgactgggcacagtggttcacatctgtaatcccaatgcgttgggaggctgaggcaggaggattgcttgagcccataagttcaagaccagcctgggcaacatagcaagacccctgtctttacaaaaagttttaaaattagccaggtgtggtggtgcgcattggtgctactcaaggagattgagacaggaggattgcttgagcccaggagttcaaggctgcagtgagccatgattgtgccactacacgccagcctgggcaac[133 bp omitted]tggtccaacgtggtgaaaccctgactctaccaaaaatacaaaaattagccaggcgtggtggtgggcgccggtaatcccagctgctcgggaggctgaggcaggagaatcacttgaactcaggaggcaaaggctgcagtgagctgagatggcgccgctgcactccagcctgggtgacagagagtgagactccatctcaaaaaaagtaaataaataaataaaaatgaaaataaaataaaatgtatccatgagcaggaatcaacctgtgcccagccagggtggtgcctagaggcacttctgtctcttcccactcgactctaaggagtactgctctctgtgacgtcagcacccagcacagggccctggcacgtggcaggaactcagtgcgtggtgaatgaacgactacatgaatgatcagattatacacagcccagggaagtgccacatagaaggtgtctccaggaatcagccggcatgctccttttagaactgcagtcacatcatagcccttcttggcttagaaccctcctccagctcccaacccatccagagtacagaccaaagtcttccccacggccctcagggctctgcacatccagcccctcagttctcagccctctcccctcacttattccccttccctcatttcccacactgggctccctctgtccctcccacgtgccaagcaaattcttgtctcagggtcttggcacttgctgttcttctcactcaggatagacttcccacacatcttcacaaagctttataaatctttgctcaaatgtcatctcctcagagaggccttcccaaaccacactgtctaaatcggcacccgcccttctccatctcctactctttttttttttttttttttttttttttttagagatagggtcttggctgggcatggtggctcacgcctggaatcccagcactttgggaggccaaggctggcagatcatgaggtcagcagttcgagaccagcctgaccaacatggtgaaactccatctctactaaaaatacaaaaattaactgggcgtggtggtgagtgcctgtaatcccagctactcaggaggctgaggcaggagaatcgcttgaactcggaaggcagaggttgcagtgggccaagattgcaccattgcactccagcctggagtccgtctcaaaaaaaaaaaaaaaaatagggtctgttggaatgcaatagtatgatcatagctcactacagccttgaactcctgggttcaagtgatcctcctgcttcagcctccctggtagctaggactacagtatacatcaccatgcccagcaattttttttttttttgtagtgacaacgttttgctatgttgcccaggctggtctcgaactcctgggctcaagtgatcctcccactttggcttcccaaagcactgaaattacaggtgtgagccaccatgcccagccctttatttatttatttatttttatcatagctcatatcactacttgacatgtttactcctctttctccctccttcatttcctctcttcttccctcactaggatctaaatgctatgattctattctgcctcattcactcctttatccccaaggccaggcacagcacatggcacacagtaggtgctcagtcaatctctgttgaattaatgtacaaatttaacagatacatgatttcctcttggagtccaccttagccttctccctgtcctcgaccacatttccagatttcttcacattctgggacaaaacctctcccgctctacaagcaagactgcttggagggctcagcctataccctccgacctcccactgagtcagaggccccagccacctccagctgcatttccaaaggagattttccagttttctgaggtacagcacccccccgacctcaggccccagataacttccttttacttttttctttttttgagacagggtctcactgtgtcacccaagctggagtgcagtggtgcaatcctagcttactgcagcatcgaattctcaggctcaagtgatcctcccacctcagcctctggagtagctgggactacaggtacccaccatgcctggctaatttctaaattttctgtacagatggggtcttgctccattgcccaggctgatctcgaactcctggcctcaagcaatcctcccaccttggcctcctagagtgctaggattataagccagaaccactgtgcctagccaactttcttatttttctattagactgaagtcaacttgtagtctccctgatctacctctagtgggtgacatgtccatggatgccatctgtcttgctctatcctggcaacgctgactctctgaacctggtttctgaacctcacagctgccggggattcccagcctgcatatcttccaaattcccctcctacatccaactctggctgcactccatccccttctacccagtacccagagggagctttcaaactacaaatcagacctgccactcctctgctcttaaacaccctccccttgccactcttctcccctgtcccacttagaatataaccaaagtcctcactgtagccttgaaggcccttccagatctggcctatgccaacctctcacctcaacctcgatcattccctgaatgcagctccaggatctttctgttccaagttcaattctgcctcagggcctttgcacttgctgctgtctgcctggaacactctttttccagctctcttatggctgattcctccccatgctctgggtcccaaactaaatgttacctactcagaaagagcagccctgactacccctgcaggtagctgccccctagtcattatcgtatctccacctttaatttctttttcttttttctttttttcttttcttttttttttttttcttttttttttttttttttgagacagtcttactctgtcactcaggctggagtgtagtggctcgatcttgggcaacctctgcctcccaggttcaagcgattctactgcctcagcctcccgagtggctgggattacagacatatgccactatacccagccaatttttgtatttttagtagagatggggtttcacc[136 bp omitted]tgaatttatctgatttctgatttatttatctgttcacttgtttagtctctccttctctcctgcaagggaggatcatgcctggatcacttaggattaaatctccggcacccagcataaggcttgtcacagagtagcagcactcgataaatatcgctcggtcaatgattagacactttcagtttctccaagaggccgccctctcagctccataccctcctacctcagatcctttacccagcggttacctctcctgggagccctttcccctgacccttctcttagttaaccccaactcaccctccagtcttctcaactgtaacctcctcagggaaacaatgtcttaaaaaactcttgcagcagcttgtttatggtaaatacaattttcataatgtcttgtaattacatatttatattacattatatttttctttcttgcatataaacctaaatgtgaaaaattacattatggtttaatacctatttgtgtggctgttactgaggcctgtgagttgtctcagggcaaagactgggtctctcttgccccctgctgtggccccagcccctagcataaagccaggtccacagccgctttcaaaaaatgattgttgaatgactaaatgatggaatgatgtgtcatgagtcaaagactaggagtattacaattccattctccaatgggtgaatgaatgaattaacgaggggtgctctgcagccaagattcctctggaccaccttcaaattccccagaattctcccaccatcaccaccagcagagcacagcccaccctccccggccacccaacgctccaggccagattccagggtggggacagtggttaccgtagtccttagggaggggggcaggtgccgaggggtgcacaacaggcttctgccggcgctcctgggtggggctgggggcctcggggacgggttcatcctcctcctcctcttcttcctcctctcctcggggtggcggggccatcggggcaggatctgtcttagtcatggtcctcggtggccctcggggggcgggtgcagagttgggggcagccttcaggcaaatcctggaggcagaggtcagctggagagggtgcccggcaggctccagggtccaagcccctaggagcttccagggccccgggtggcctccgcgcaactggatcttgggcaaccatagggacccccgttacccatagagggccccggtgtgtgcgcccagcgcctgccacctcccccaggcccagccccccattcttctcctcccgcgtcaggcccctcagtcgcggctgccccctccccgggtttgtttatctcgggattcaggatgcttcgcccctccccttctccgcgggccgccccctccccatcttacctcgggcagacagcgctggggaccaaagtggagactggggagactgtgggagcaatggggtgtcggtgtcaggggacgtgatgggggaggcaagggagacagagagaaggggacgaggcccagacgccgacagggggtgggggcggagagggaggggcgcgactgcgcatgcgcctgctgcccccctaccggcggcgggggaggagggaccaggaggagggaccgggaggcgctcgcattgatggaggggccagaggcggcgactgaaaggggagagcctccgggcactgggagaggaagagatggctacggaaaggagcgagatgagcagatacaacggcaaaagagagggctgagagagcggacacagatcttctccatccccttcccccacgcctgcaaaccaggccggtgagggcagtggtcttggggcgtggtgacgatggggaccctctaggggaccctctctctaggaccctagaccggaccccttctccaagctcaccattcataatgggtgcctcagaggggtgatttcctagagactcctatcatgatcatctcatccttaccatcataatgcgaggctcacacactggggcccagaggttaagcagcttgcccaaaagtacatgagtaggtgatggagcgaacatttgaaaccagacagtctgtaaagtctgatttttatttttattatttcctagacagggtctcactctgtcacccaggctactgtgcagtgttgtgatcttggctcactgcagcgtcaaacttctgggctcaagccatcctcccacctcaacctcccgagtagccgagaccacacgtgcatgccaccatgtctggagaattttttttgagacagggttttgccatgttgcccaggctggtcttgaactcctgacctcaagggatcctcctgcccctgccacccaaagcgctgagattacaggcacgagtcaccatgcccagctttgattcttaatcaccatgctacatgcctgtagcagtgtctgggaaacagatctgccgattgacccctccaactctctcagaacctgtatcttccccacggaggcctcctgaagccagcccagggtcctggctccattgtcatggcttggcttcccacctggagctgtagcctgctctgcctcaaatcatcccagcctggatggggctgggtgacagccttgaacacctcatccttctaatgcacaggtccagtagctccatctccaaaagatttccaggatctcactctccccaccgctaccctgggccctcatcttggtccatccttcttcttctgccaccagcactacggcagcagcctcttacctgctgtccccgtcctcctccaacatgcagccacagggacccatgaacacctgtcactttggagccctctttccctcagaggggtctgcctgctgcacctcactccaggtagaagccaaggctctcagccatggcccacaagggcctatgtgaacctgccccatcatctctgcactcacctcctctcaccctcttttgttcactccaccccagccacactggcctccttgcttctccctaccccaggacctttgcactggctcttttttttttttttttttgagatggcagtctcactgttccccaggctggagtggagtggcatgatctctgctcactgcaacctctgtcttccaggttcaagtgattctcctgcctcagcctcccgagtagctgggattacaggcctgtgccaccacacccagctaatttttgtatttttagtagggacggggtttcgccatgttggccaggctggtctcaaactcctgaccttaggttatctgcctgcctcagcttcccaaagtgctgggacgacaggcgtgagccaccgtgcctggcctgcaacggctctttgtgatgcccggaatgctcttcctccaaatccctacgtggctccctctctgccctgttttaggatcttacttgttggtgtcttttcaccttctctgctctaaaactgcaccccttcctcccttccctactatggttttctccatagcaacaccgcctcccagacctgacacatcccagacagcaggccctcactgcaggggttgttcgtcctctggaacctgagcctgtagcgctccaggccagccccttctgatcacccaggtttctgctaaaacatggccttggagggccctcccccaggcccaaaccaaatttttgttgtctttatagcactcatcgctcatgtctgcagtgttcttgtttatttgtttactagttcatcgtctactcaagtagaatgagcaccatgagggcagggattttctcagctgtgtccaccatggtatcatgaactcagtaccaggcttggcaaaaagcgtgggactccttagaaccaggtatgattctcccaaacaacccttgctctgctctgaggctgtcgtactgatttgcaaagatctgagccgggggtggcagaagcctggtacccaggggattgggggctgatgagagacttgggcccaggtcacccctaaggttcaagagatccctaggagtggggtggtagaacccaggcccttgagggaggcactgctactacccaggcgtgggcggtggggctgggccaagcccacgtataatgtctttcctcctccatcttctatcttttgtccctcgacattgtctgtcttgatccttatgcactggggatccgagtgtccaggagctccggcttggcatccactgtggcaggtgcagggtcctgggcaaggaccatggctatgtcaggccctccacagatgatggtgaaggtttgggattcctcaggtccaagggtctgggctgttgtctaaggcaaagaagtggtagagatggggaacattacgaagcaagttgcgggagagacagacagataacggtgaggaacagggaggcaaaggtggcaggagggcgtgtcaggaaacagagagagatgtggggagagatatgaggagacaggaaagcagatgtgagggccagagagacattcatgggaaaggaaagaagggtggggaaatgggaagagaagtgcgggggcacagacgcagacacgtgggggaaagagatgtgcaggcagacagacgtacagacagggtcagagatatgggggagacagaaaatatgcagataaagagagacacagggaggtggggaaacaggtggcggacagagatgatgggcagaaagacaatgaatgttggggagggaggagattgggaggtagggatagatgagtaggagacagagattgaatgacaggaggggaggcagagagaggcagtcagctcaggggatctggcaggctccacaaagagccccaggcccgagtctgagctctgtccctgccccactgtccctctgtgccccaggccacagtctcaaacttcaaggccccagaggcagccacactgtagctccagccaactgctatcacctgagaatccaagcccagtgctgctagatatgcagagccttcaggaaagaccagactttttttttttttttttttttgagacagagtctcacagtgtcacccaggctggagtgcagtagcacaatcacagttcattaaagccttgaccttctggactcaagcaatactcccacttcagcctctcaaatagctagaactataggtgcaacacttggctaattttttgtgtttcttgtagagacagggtttcaccatgttgcccagtctggtctcaaactcctgggctcaagtcatctacctgcttcagcctcccaaagtgctgggattacaggtgtgagccactgcactcggccattataaattattttaaagcactgcggaggccaaacaaattgtatctgtgggtcatgtccaaaccactgactatcaatctgagactcctggctgggcatggtggctcatacctgtaatcccagcactataggaggccgaggtgggctgattacctgaggtcaggagctcaagaccagcctggccaacatggcaaaaccccgtctctactacaaacacaaaacttagctgggcatggtggcacgtgcctgtaatcccagctacttgggaggctgagacaggagaatcgcttgaaccagagaggcagaggttgcagtgagctgagatcgcaccactccactccagcctgggcaacagagcaagactccttctcaaaaaaaaaaaaaaaaaaaatcggatactccttaactccagaggtactgtgggggctccttcctgagccccttcagtgagtctagcattcagagctctgtgtgggcatctctctcatacaagcagggctctgaaagccatgggggctaagctgggcacctcaagcttggccctagggttttaagacaggagaaatttcgccttggtcaaactgtgattttcagagacataacaccattcctcatcttcctcccccgccaccccacacacagagacataacacccttcctcaacttcctcccctacacacacacacacacacacacacacacacacacaccttcctcagcttcctcccctacacacacacacacacacaaacaccttcctcaaattcctcccctacacacacacacacacacacacacacacacacacacacccagcagtaaaatatagaggcaaaagggattcagatagggcctgggggacactattacagagattgcaaactccagctctataggggccaggcaggaagctctcacaggcctcttctgcagccagacacctgggtttgaatcctggccctgaaacatgttggctgcctgactgtgggcacactactggactgctctgtgcctccattttttcatctggaagatagagacaacagcagtattaagattataatgaggttttttttgtttgttttttgagatggagtgttgctcttgtcgcctacgctggagtgcaatggcacaatctcggctcactgcaacctctgcttcccaggttcaagcaattttcctccctcagcctcccgagtagctgggattacagacgtgtgccaccacgtccggctactttttgtatgtttagtagagatggagtttcaccatgttggccaggctggtctcgaactcctgacctcgtgatctgcccacctcagcctcccaaagtgctgaggttataggcatgagccaccacacccggcctttttttgtttttgtttttgtttttgagatggcgtctcgctctgttgcccaggcttgagtgcagtggtgccatctcggcttactgcaacctccacctccagggttcaagcaattctcacaccttagcctcccaagtagctgggattacaggtgcgccaccatgcccaactaatttttgtatttttagtagagacagggtttctctatgttacccaggctggtttcaaactcccgaactcaagcaatctgcctgccttggtctcccaaagtgctgggattacgggcatgagccaccgcacacagaccatagtgagttttttgtttggttgtggtttttggttttttttgagaccttgcttggtcacccgggctagagtgcagtggtgcgatcttggctcactgcagtctctgcttcctgggctcaagggatcttcctgcctcaggctcccaagtagctgggaccacatgtgcccaccacaatgctaatttttgtgttttagtgagacagtcttaccatgttgtccaggctggtcttgaactcctaggttcaagcgatctgcccaccttggcctcccaaagtgctaggattacagatgtgagccactgcattttttaaaaattaaccttgtagcagtcaggcatggtggctcactcctgtaataccagcattttgggacgccaaggcaggtggatcacgaggtgaggagatcgagaccatcctggctaacacggtgaaaccctgtctgtactaaaaatacaaaaaattagctgagcgtggtggcgggcacctgtagtcccagctacttgggaggctgaggcaggacaatcgcttgaacctgggaggcagaggctgcagtgagccgagattgcactactgcactccagcctgggcaacagagcgagactccgtctcaaaaaaaaaaaaaaaaattaaccctgtagctccagctcaaagggtcatagtgagttttcagctcactatgttataactctgtgtctggcagacaataagagcttctcaaatattaagtatttagtattagtaaatggagcaatcattactcagctccaaccaatagttgcttggcattgccagattttgtttttcaggaaaacctagaaatttgttttaattttctgtagagacagtgcttgctatgttgcccaggctggtctcgaactcctggcctccagcaatcctcctgccttggcctcccaaagtgttgggattacaggcgtgagccactgagcccgggaaagccagaaatttggaaacacggctgaatgttctgatttttgaataggggatcctagacaaaatgaaaacacactgcaggccaggccaccacccatggatggggctgccaggctggggtgccactcaccaggcgctgcagaccccggcgtgcccgtgccagcaggctctccccgtgtagctgctgtgccagccgttccagggcctgcagctgcgcctggtgccgctcctggcaccgttgcagcctccgcacccggcgttgcagtgctcccagcactgggcccagcccggtctgggcctgttgggcagggacttcaggttgtgaccgctcaggagttggcgcaggggccaggggggtcaggagcatggtggccacagtcttggggctccccgatgtggggcccagcaccactaggcgcactgggccagagactgggatggcagggctctggggcaggggtgtattcttctgtaggggaggcggcggcgagactggcttctgggtgcttcgggtcctccgctgactctggaagacaaggcatggggtgcaggggtgccgtggtcagacttcgactcaggaggaaagggatggagggtctgtttccaagggggacttgcctaggtaaggccagacctcagggaggaagtgtcgtcaggaggggagggccaaagttcagactcaaggagggacttcccttaggcagggaggtctgggggttggattccagcagcaggacctcccagcgctcaccttggcaggtggtccccgggagaagatggagggcactgcatcaggccgcaggtagcgcacaccccagcgccactggaagcaggagggtgtgaagtgctcgctgcacaagtgctggtggcagctgggcacccagtgctcacagcccatgtgctgcagccaggcctgcagccggggaccatccttcagtgggaacctgcatgggtggttggggggctgggtcagtgctacgaggttcagacttatccctcccagaggatacccaccctggaggtctctgggctccaagcctgtgcctccctagggctaggaagtagacctgtcttgtgcccaggctttctctatctcatacacacaaccacaacccttttttcagcttcatcttttagtagtagtattttgtgagacggggtttcgcacttgtcacccaggctggagtgcaatggcgcgatcttggctcactacaacctccgcctcctgggttcaaacgattcttctgcttcagcctcctgagtagctgggactacaggcgcacgccaccacgcccggctaatttttgtatttttagtagagacgaggttgcaccatgttggccaggctggtcttgaactcctgacctcaggtgatccacccaccttggcctcccaaagtgctaggattataggcatgagccaccaagcctggcatttcttcttattattattaatttgaaagctccaccttttaaacacccagcatcagcccacctctgccccctccactgcccctccttccagcctccttcctggtcttcctgcccacagtcccgcccctccactcccaatttgttcttccacatcaacttgttggagcagtttataaaatcagacagttacgatgtgggagatcgtgcagccaagcgaaaacgtttcttccacaccatataaatgggggtgtggggtttctggattaagagagatttaagaaacatcagcacaaacgcaggatgtggaccttgcctacaacaaacaattcagtaaaaagacattttaagacaattggggaaaactgaacatgaactggttataagataattgtaagaaactggtcaggcatggcggttcatgcctgtaatcctagcactttgggaagacgacaaggtgggaggatcgcttgagcccaggagttcgagaccagcctgggcaacatagggagacctcgactctacaaaaaaaaaaaaaaattagccatgtatggtggtacatgcctgtagtcccagctactcgggaggctgaagtgggagggtcacctgagcctgggaggcagaggttgcagtgagccgagattgcgcaactgtactccagcctgggtgacagagccagaccctgtctttaaaaaaaaaaaaaaaaaattcattttgctaggtgtgataactgtattggtttatacttctgaaacagtcttctgttagaaatcagtctgaaataattacggataaaagatctgatgtctgggatttactttaaaatagtgcaggacaaaaacttagaggtgtgggcagggcagggaagaagattggcaaagtgttgataactagtgacacagtgatggatactgagggctctactttttgtgtatgcttgaaaacacccactaacaagtctttaaacaactcaacaacaataaaacacaaataacctgattcaaaaatgggcaaaggacttgaacaaacatttctccaaagacatacaaatggccaataagcacatgaaaagatacttgacatctccaatcattaggaaaacgcagtatcagaaccctgatgaaatatcatctgacaaacaccagaacagctactattgaacaacaacaaaaaagaggccgggcatggtggcttgtgtctgtaatcccagcactttgggaggctgaggcaggaggatctcctgaaggcagtagtccaagaccatcctgggcaatgtagcaagaccttgtctctacgaaaaaatattttttaaattagctgggtgtggcaatgtgcatctatagttctatctacttaggaggcaatgtgggaggattgcttaagctcaggaatttgaacgctgcagtgagctatgatcacactactgcattccagcctgggtgatggaggaggaggggaaggggaagggggagggagtaagagggggaggaagaggaagagaagaacagtgtgtgtgaggatgtggaaaaactgctggaactctggtacactgctgggaatgtaaaacggtgctgccactgtggaaaacaatatggcagttcctcaaacactgaaaaatagaattaccatatgacccagcaatccacttctgcttacatacccaaaagaacacaaaacagggtcttggagagatattt[131 bp omitted]tgaaatcttgtctctacaaaaaatagaaaaattagccagatatggtggcatgtgcctagaggcacagctactcaggaggctgaggtgggaggactgcttgagcccaggaggttaaggctacagtgagccatgatcacattactgcactctagcctgggcaaaagagcgacatgctgtctcaaaaacaaacaaacagacaacagaaacatagcagcataaatcacaacagccaaaaggtggaagtgtctatcaacagatacatggataagaaaaatgctgcatatacatacaatggaattttattttatttagtcttttttttggggggagggaggagatgcagtctcactctgtcacccaggctggagtgccatggcgcaatctcggcacactgcaatctctgcctcctgggttcaagtgattctcctgcctcagcctcctgggtagctgggattacaggctcccgccaccatgcccggcttatttatttatttttgcgatggagtctcactctgttgcccaggatggaatgcagtggtgtgatctcggctcactgcaacctccgccccctgggttcaagcgactctcccgcctcagcttcccaagtagctgggattacaggtgcctgccactgcacctggctatttttgtatttttagtagagatggggtttcaccatgttggccaggctggtgtcaaactcctgacctcaggtgatccacccacctcggcctcccaaagtgctgggattacaggtgtgagccactgcatctggcctggaattttatttagtcttgatctgacacatgcaacaacacagatgaactctgagggccattagggtaagtgaaataagccagtcaaatactgacgatttcacttatatgaggtagaacagtcaaattcctagagacagacagtggaatggtggttgccaagagcctgggggagagggaaagagggaattgtccaatggggatagagtgttttaggagaggaaaaagttctggagattggttatacaacacttaacattagtgaattgtacacttaatgatcaaaattgtacacttaaaaatgatcaaaatggtag[138 bp omitted]gttcaagaccagcctggccaacatggtgaaaccccgtctctacgaaaattacaaaaattagccaggcctggtggcgtgtccctgtaatcccagctactcgggaggctgaggcagaagaattacttgaacctgggaggtggaagttgcagtgagtcgagatcacgccactgcactacaacctgggcgacagagcaagactccatctcaaaaaaaaattttttttgttttaagttttaaaaaataaaagctttctcagtggttgtgggtgaggattatctgatgagggaccctctaaatgtgccccacttctccggtttccgggtgccacttattcccagcatctgctcttaccctcttagatggtaatccactctctatttagacctgggctcaaggctacccataataaagacctccttttccagccttatttgcagccaggggtggccacatgatcaaatgctggccagtttgtccttagcagctgccagaaactgagactgtaaatgtttatttcaagctgctaaatttggggatagtttgttatatagcattagataactaagacacatctcatgcatatcccatcttcacaatgttttccatatctgtgatattacttatttcatatttttcttaaaactaaccaattttaactattaaacaaagatacttaaaagagaaactttacatcacaattgaaaatggaaaatcagtatcaattccataaacaaaagctaaccataaaaacatcagatgccattacctactgagggttatgagcctgaggcctgctctctttcttttcttttctttctttttttttgagacacggtctcattctgttgcccaggctaaagtgcagaggcacgatcatggctcactgtagccctgaactgctaggcccaagtgatcctcccacctcagcctcccgagtacctgggaccacaggcatgtgccaccacacctggctaatttaaaatttctttttgtagagacagaggtctcactatgttgtccagactggtcttgaactcctgggctgaagtgatctcccacgttggcctcccaaagtgctgcgattataggcatgaggcaccacaccccacccctgctctctctttgttgaaaagatagactagtgagtgctagagaattagggacaaaattcctacaggagagagggtaaacataggcacatccacacaaaagaatacgatgcagctataaaacagaatgtagaggtactctgtgaactgacatgctattgtcaggcacacattatgtgaaaaaaagcaaggttctaaatagactatctcagcttttagtcattgtggtagcccccaaaagctatccatgtcctaattcctggaaactgtgactattactttatttatttatttatttatttaatttatttttttgagatggagtctcgctctgtcacccaggctggagtgcagcggcgcaatctcggctcactgcaagctccgcctgccaggttcacaccattctcctgcctcagcctcccgagtagctgggactacaggcgcccgccaccacgtccggctaatttttttgtatatttatttatttatttatttagagacagggttttgctctgtcacccaggttggagtgctgtggtgtgatctcggctccctgcagcatcaaactccccaagctcaggcaatcctcccacgtcagcctcccaagtagctgggactacaggcatgtgccacatgcccagctaatttttatatttcttgtagagatggggttttgccttgttgcccaggctggtctcaaactcctgggctcaagcaatcctcccacctcggcctcccaatgtgctgaaattacaggcgtgaaccactgtgccaggcctgaatattaccttatatgacaaaagatgtgattaagttaaggatcttgagatggggagattatcctgggtcatccgggttggccctaaatgccactacaagtatccttttaataagagggaggagaatatattaccacagaaaagaagagagggcaatgcaaccatggaggcagagactggagagatgtggccacaagccaagcactgcctgcagccaccaggaaccggaacaggcaaagaagagattctcccccagaacctccagaggagtacagccctgccgacaccttggttttggcccaggaaagccgatttggactcctggcctctagaactgttagaaaataatttgtcttgttttaagccaccaagtttgttagagcagcatgggaaactaatagtgtaataaagggagaaataagaatgtctttcacatttgctggtatttatataaagaaactatggtaatgtggtttggctctgtgtccccacccaaatctcatcttgaactgtaatccccatgtgtcaagggagggacatgatgggaggtgactggatcatgggggatgtttcccccatgctgttcccatgatagtgagtgagttctcatgagatctgatggtttaaaagtggcagttcccctcttgctctctctctctcctgcccccatgtaagatgtttgctttcccttcgccttgcaccatgattgtaagtttcctgaggcctccccagccattcagaattgtaagtccattaaacctctttcctttatgaattactcagtctcaggtagttgtttatagtagtgtgagaacagactaagacacataggaaggacacacaagaaactaaagaggctaccagtggggaggaggtggatgggatgaacggagatggggagagccaagacttctcagacaaaggaagatggaggtggagggggcaggtagctggtgaaagagcacagaaaggctgactcagagaacagcagtggcacccagagagcagaaccccagggcacacagccagggagtctggctgctgcagtcagcctccctctaagatcccaatgttctcagcagccccattcttccgggacacaaacacaagatctattgcaacagcattccccattcttattgccaccatctcccaggcagaatctgccaatggactactcgtatctactctctgccttttccttactaacagaactccaactttctttgaggccacaatgtgtcctgctaaaagactatgtttcccaggatcctttgcagctggctggggcgtgtgactaccttctggccaaggaatgctttagtgttgtgtgggatctctgggatggtgccttaaatggaagggacgatcaacaggattcagcagctcaaagagcaaaggaaaaaagtcaatatcctaagaaaggtctccttaattggtcttactctctcttgttcctctggatagcagcatttgtaatgggcaatgttgctttctaaaaaactaccttaagcagacaacaagtgttcccctttgtatgcagtcaaatgctctaccactgagctatacccccatgttcccctttgtataaactattttagtcttgctggtcatcttgtccagagcatggggtggcatatactgctagaagtcctttttttctttcttactaatgtaactcaaaatttcttcaggctgattaaatgcccagtttttaaagaccacaattcccagcctcttttccagttggggtgaccaatgatgaaaaggtgccattgaacggggtttctgggaaggccttataaagggagatgattcagtttagacctgaacgctttttgctcttcctcccttcccttttcctcctataaggaatggtggcagtggtggctggggcactggcagccaccttggatggaagccacaggccaaggatggaagccacaggctaaggatgacagagcagaaagaggccgggcatggtggctcacacctgtaatcccagcactttggtggccaaggtgggaggatcatttaaggccaggtgtttgagactagcctggccaacatggcaaaaccctgtctctactaaaaatacaaaaattagctgggtatggtgacatgcgcctgtaattctataattccagctacttgggtggctgaggcatgagaatccctagaacccaggaggtggaagttgcagtgagctgagactgtgccactgcattccagcttgggtgacagaatgagactttcaaaaaaaaaaaaaaagaaagaaaaatagtgataggacccctcatttctcatgactgtggagctactatcccagtgctggtttgccaacctctgtactttctgtatatgagggaaaataaaccctgtaatagaatgtctgctgtctctctccacatgaggattacacatgcccactccattgacttgaggcttgctatatacttgctccagccaaaagaatgccagtgaaagtgacacaggccacttctaaatatgaaattgaccaagagccactgggtgattcactccactttcttttttcctcctcctgcaagaccagcaatactccaaatagggatagtttattcagcctgagaccccaattaagatactgtagagtaggaccacaaatgacctgcaaaggacatagtgtgagcaagaaatacacctttgggccacgtgtggtgattcatgcctgtaatcccagcactttgggaggctaaagcaggaggactgattgagcccaggagttccagcctgggcaacatagtgggacttcatttctttttttttttttttagacgaagtttcacccttgttgcctaggctggagtgcagtggcgcgatcttggctgactgcaacctccgcctcccaggttcaagcgattctcccatctcagcctcctgagtagctgggattacaggcgtgtgccaccacgcctggcaatttttgtatttttagtagaaatggggcttcaccatgttggccaggctggtctcaaactcctgacctcaggtgatccacttgcctcaaccttccaaagtgctgggattacaggtgtgagccaccgcgcccagcccaatgggacttcatttctacaaaaattagaaaaatttgcctgacaaggtggtgtctgcctatagtcgcagctactcaggaggttgaggcgggaggactgcttgagcccaggagtttgaggctgcagtgaaccatgatggtgctgcactctagcccaggtgataaagaccccttctttaaaaaaaaaaaaaaacaaaaaaacaaaaaacacctttgttgtagtaagccactgagatttgagaagtttgtttgtgcagcataacttaaccacactgattcctatagaccccataatttgtttaagcaactcttattgcaggactttgttactaccaagcagatacaattctaagtgataggtcccccataagagatgaccccattgccactgtccctgaaagggcctaagacagagctaatgaaagctagccaggcatggtggcacatgcctgtagtcccagctactcaggaggctgagatggagctggtccgagtgttgtgggttattgttaagctgatttaacattgtctccccacacaaccatgcttgactagcataaaaataaaaaagaaaaatgaaaaaaacaaaaaaaaaggaggctgagatgggaggactgcttgagcctgggaggctgaagctgcattgagccatgatcgcaccacagtactccagcctgggtgacaaagcaagatcatgtttcaaaaaaaaaaaagagagagtgaactaatgagtgttcccattggctgccaagcaggatttcaagttatttcctggcagccacttccctcaatgtgtctcatcttatctctcacctggcatccatgccctctcctaagcctcttttggaaactgcttctcatctaactcttaactaagtggcttctgcaagactgactcaggggtaggccctgaggtggaaatgggctagtcactagcgggtgccaatgaagacatgaagtgatttttatacagtcatctggctgctatatacagtcgtcatcattttcctccttattatacatacaaagcacttagaacagtgcctggcataaggtaaatactaagtaactattgttgttgttatgagagaggtaagagtggaaacgggccaggcacggttgctcacgcctgtaatcccagtactttgggaggccaaggtgggtggatcacctgtggtcaggagttcaagacccacctggccaacatggtgaaactccatctctactaaaaatacaaagaattggctgggtgtggtggtgtgcacctgtggtcccagctactcaggaggctgaggtaggagaatcacttgaacctgggaggcagaggttgcagtgagccgagatcataccactgcactccagcctgggcggcagagcaagaccctgtctcaaaaaaaaaaaaaaaaaaaagatgatggcagcctggactacatgatgacagtggatgtgatgagaagtagtctgggaatgtgttttccttatttcttatttatttattttgagacaaggtctcacacggttgcccaggctagagtacagtggcacaatcacagctcactgcagcctcggctcctgggatccagtgattctctcacctcactgtctcatgtagctggaactacaggtgtgtaccaccacgtccagctaattttttacattttgtagagatggggttttgccacgttgcccaggctggtctcaaattgctgggctcaagcgatcctcctgcctcgacttcccaaagtgctgggattacaggtgtgagccaccacgcccagcctatctttccttatttgttaatgatttatttaggaatttctcatttgtgtttataactgtcttgtcaaggtgttagagattttgttgtggttgttgcaggatggagaaatgtcttgagggtagagccaaagggtgggttaatggactagcggtgaatgaaaaggaaggatcatgggtaactcccaggtcacgtactcagttcctcaatgtttgatccctcacctatccatgagctctgtcatggcagaaacaagatctgtcaggattctttgtgtccagcaggggcttacttgcttctccaagaaatactcaaaaagttgctgaattaatcaatgttgccagagtcatacacaggcttaaagtccctttggccctacaccagggtccctcaaaggatccgtgacacatggactgctggctttcctggagagcccatctgaaaggcattcaccaaatccacccaacgaatctttactaagaacctactatgtgccaggcaatattctagaggttggagacacaaacaggaggaaagaagaaagacaaagaaagacaaaacctctggcttgattgaactgatattctagtgggggagataatgaatgaatacatcgaaaacgcaatatgcagacagtgatgtgttaaagagaaaaataaagcaggagacagagagaatcgtgtgtgtgtttgggtgtcagttacagttttccatagggtggtagtcataaaggcaagaactttgaaatcagagggaatcacacaggcaaagtccccagggcagcaacatgcctgccacactacaggaacatgaagtaggccagtgtcactggtgtgaagggcaggaggaaagagatgaggtcacactggtatcagggaaccagctctgtaggactttgcaggcctgctttctacctgttccagcctcactttattttttatagtgaggtgggagtcacggaagggatctgggcagaggagggcgctgatctgactcaggtgttcacaggctccctctggctgcaagcagggaacagactgggggtgacggtgggagcagggagaccaatgaagaggctgctaaaatagtccagtctggaggtgataattgccaggagcaggatgcaggaagaggagagggttagaagtgatcaaattctggacagtttgtaaagggagagccaactggatttgctgagggactggatgaggaatgtgtcctagcccacttaggctaagaccaccagggacaaacctgtagtccagcactgtcagatttatttacaatggcaatgggagagtctgcacactagagataccataggccaggggtccccaactcccaggctacagacgggtaccagtctatggcctgttaggaatagggccacacagcaggaggtgagtggcaggcaggtgagcgagtgagagaagcttcatctgtatttacagccactccccactgctcgcattaccacctgagttccgcctcctgtcagagcagcagcagcattagattctcacaagagtgtgaatcctattctgaactgtgcatgtgagagatctaggttgccctccattttttttttgtttgtttgttttttgggttttttggttttttttttagatgaagtctcactctgtcgccaggctggagtgcagtggcgcaatctcggctcactgcaacctctgcctcctgggttcaagtgatcctcctgcctcagcctcccaagtagctgggattacaggcatgtgccaccacacctagctaatttttgtatttttagtagagacaaggtttcgccatgttggccaggatggtctcgatctcctgacctcgtgatctgcccgccttggcctcccaaagtgctgggattacaggcatgagccactgtgcctggccagttgcccgctttttatgagaatctaatgcctgatgatctgaagcgtttcatcccaaaaccattcccccaaccctatcccatccgtggaaaaactgtcttccacaaaaccagtccctggtgccataagggttggggaccactgccataggccctatgggcctttgttttgtgagggagtctcaacaaacagagttattttttaggtgaaatgtaaactaagcagtgttcagattgcctcaaagcaaatcagaactgtgtgtaaagggatcaatatcaggtccggatggtgaagtgggcccagggtttgtcttctcagatgcaataaagtttacatagatgtagaatattgtgtccttatctgaagctccaaacctggattgtaaatagggactgcttttctgtgtcaaagtgacttagctcctccaagcaaaagtgagatgtttcattcttacttgatgtgatttcaaacagcaaagtttgtgatcatctctgactttagacaaccaaagtttcctactaagaaagcagtagacactcaaaggatgggaattctgccactttacatctgcagtatgtccaagagaaatattttttcctggctgggtgcagtggctcacgcctgtaatccaagcactttgggaggccgaggcaggaggactgcttgtgcccaggagtttgagactagactggacaacatagggtgatcccatctctctctttaaaaacaaaatttttttttttgagacggagtctcactcttgttgcccacgctggattgcagtggcctcatcttggctcactgcaacctctgccttctggattcatgcgattctcctgcctcagcccacggagtagctggaattacacgcatgagccaccacgcccatctaatttttgtatttttagtagacacggggtttcaccatg[137 bp omitted]atccaggcatggtggcgcgtgcctctggtcccagctacttggtagggtgaggtgggaggatcacttgagcccgggaggtcgaggttgcagtgagctgtgatcgttccactgcattccagcctgggcgacaaagcgatcttgtctcaaaaaaaaaaaaaaaaaaaagcaaagaaatgttttttcctagtaattcttccaccaactggcttatgtcagccagataaataaggagacagatcttttacagtcgaagctaattctgactttcccaagtatgacgaaagaggtaaggatgacattttttaaacctaagcaacaagaagaatgaagcacgctactaagataagacagactggaaggttttggggagacacgatcgcaagctcagtttcggatgctctgagtttcagatggctcaaatgcgtggggagggcaagtgggcatctgcaggctctctaacagcctgcaccgacttcacttcttacatccctttcactcttcggctcgcttcgctcgctatctgtagtcaatcgtctactcctgtttcccacgcctgcacctttgtatgtgcaatggacactgccaggaaggccatctcctcatggtttaaccccacttcctaacaccctcaagcaagaccagaagccccgcacagcagcactaatgctcgggccccacccctctcagggtcccgcctccctcaagccccgccccgcgctgcgctcacttgtagaagctcacagggcggttgtctgcacccaggcggcccgcagtgttggagcagttcggcgccctgcagtacttgggcatggctatccagcccccgctgagttttgccgggtcagcggctgcactttggttctcgcggagcgccgcctaaccccgccccacccgcgctcgccgcctgcctcacgtgacgtccgtggagtctcgtcacgtaccggggagagagctgagagcgcctgcctactaggcgcccctccacagtgccacagtcccgccctcgtcacgtgacgaatgggccatagcgagtactgtgcacctgcgcaaagccggcccttcgtcaccccgactttcatcacgtgttggggggaagggcggcgtcacggcgtttctgagcctgcgccaaccaaatcaactggctagtcaatctcttacggctccaccctacgcctacatccgggcaaccgttggggcgcacatagttcctctaggtggcggcaaaaaccgaggtgaggcggccgtggccttagcctcgtaaaaattaaaacctgtatgtttcagcgaataatgaaaacgcagtctggatgaaagaccccatgacgcttaatcaggcatccagtacactggctgtggccccgccccgccaggcactcgctccgcctcttcgcccccattggttctaagcgccgcccggcatccctgcgattggctaggccgggcccgtcgcgtccaataggcggtggcgccggctttcccgcggctgttcgctgttccagtgggtcgtggcggtggcggcagcggcggttaggggatgtaacggtcgcccgcctccggcgtgacgatggcggccgtagggtccggaggctatgcgcggaacgatgcaggggagaagctgccctctgtcatggcgggagttccggcgcggaggggccagtcctccccgccccccgccccaccaatctgcctacggcggcggacgcgactctcgacggcctccgaggagacggtgcagaaccgggtgagaagctgctcgccatgtctaccccagttccaggcttcctaggtttcccctagtcccgtcctgagaactgtggccccgacatcagcccccggccagtcccctcaggttgttccctgccatgcctcgtcccctaacccccgcccctttagccacggcccctcccactttctcctcgctgctttcccggctccaccctcagcgttggagcaattcgggggttcctcgctggttcccacccgtggaaatgcattttgcttctgtaaatcacagcctagtcctgctatattttaacccccgttctatcgcctttagacgtcacgatcatagctcactgcagcctcactgccctggcccccgctgagtcattaaggtcccttcgagggttcggtccagagtgttacctgccccaactcttcctcgcttctaccccgccttctctcaccttctgcgatctctatcctttttcctcaccaaggtgggattcttaatccatattgtcactcaaaactatgagaaagacgtgagaagttatttataaaatctctgcagtgctgcctggggaggagggcgtacagaacagttccctaaatcctgagacagaaaaatggaaagaaatgatttcacagtaggtagaaggaattccattagcacagcggcaattaaaaaaattgttttccagctgtgtaggcacaaaatctgtttttataaaatggagatgataagaaccatactactggtagggcgcggtagctcacgtctgtaatcccagcactttgggaggccaaggtgggctgttcacctgagatcagttcaagaccagcctggccaacatggtgaaacccgtctctacaaaaagtagaaaaattagcccggcatgctagcgcgcgcctgtaatcccagctactcaggaggctgaggcgggagaaatcgcttgaacctgggaggcggaggttgcagtgagctgaggtcatgccactgcactccagcctgggcgacagagtgagactctgtctcaaaataaataaataaataaattatactattgcattggagggaaatgaaattttaattgtgatcttcttggcacggagtccagataaagggaggatacctggtagctgctggtggagcttgttcctgccccatgactttctcctgcactgtgattataccgcccactcctggctacagggctctggctgtacctcccatgtgctctctgtcaccaaggttcagtcacactggcctgcttttggttttcctgaggctccatattcttttctgcctcctggcctttgtgattggtgagtcctcagcctgggctttttgctgcaatctgcctgtctggctccttcccatccttcaagtctcagcctgaatgtcgctatcttgaaaggccttctcgaaccccattctaaagcaaacagccaccttcatctgtcacccagcaccctatacttcatagcctttatcttatatgttcctgaaagtgccctttgagctattaaactacatataacaatagcaaattcagagaggcgttatagcaaagtggctaagagcacagactgctgctgatggtatggttggacccaggcagcctgagcttaaactttagtcctgttcttcctggcaggttatgaacttcgctttttcttttctttttttttttttttgagatggggtcttactctgtcatccaggctgtagtgcactgggttgatctcggctcactgcagtctcagcctccctgggctcaggtgatcttcctgcctcaagcctcctgagtagctgggactgcaggcgcatgccaccatacctgactaatttttttgtgttttctggtagagacagggtctcgccgtgttggccaggctggtcttgaattactgagctcaagcgatctgcctgcctcggcctcccaaagtgctaggattacaggcgtgagctactgtgccccgccaagttatgaacttatctgtgcctcagttttcttatctgtaaaatgagaataatgatgtagaaatctctcatagggtatttgtgaggattcaatgaggttacatatcctaggcacttagaacaacactggcatatggcaagtactctattcatgttagctaatactgatattatgactgtgtatttggggtaatatttatttattttttttgtttggcagcacagagttgatctgtcttgcaaagacctagtctaaaagtgaccattcataccagggcccagtaatgctgatcgacagataagacaacatgagtgccatggcttggttgtttgtgttggaatcctggcactaccccttcctggatgggtaacccctcttggcctctgtttcctcaactgttttgttcctttttttttttgagacagagtctcactctgtcgcccaggatggagtgcaatggtgccatctcagctcactgcaacctccgcctcctgggttcaagcgattttactgcctcagcctcctgagtgcctgggattataggcatgggccaccacacctgactaatttttttgtatttttagtagagacagggtttcgccatcttggccaggatggtctcaaactcttgactgagccaccacacccagccttgtttaaattttaaatattactgttcatgtggttttttactcgttgaaaccgctcaaatttctggactgtgaatctgatgtggggaaactgtctacctttggtcactactgtgtctctcctgtacagcccaaagtgctagctttggagccagactgcctgggtttgtatatcaacattgccacttgcagatgtaggatcttgggcctcagacttcttacctgtaaaacaggggtgataatagagccttcttcgtggcttgttgggaggattcaagtcttttatacatataaaagtactaagaggccgggcacagtggctcatgcctgtaatcctagcactttgggaggccgaggcgggtgtatcacctgaggtcaggagttcgaggccagcctggccaacatggtgaaaccccatctctactaaaaatacaaaaattagccggacatggtggcatgtgcctgtaatcctagctactcaggaggctgaggcaggagaattgcttgaacctggaaggcggaggttgcaatgagccaagatctcaccactgactccagcctgggtgacagagcaagactccatctcaaaaacaaacaaaaaaaagtacttagaaacttattcacaggtcaccttctcaccgcggcattcgcccccttcccctgtgctcctaacctccttatctgctttcttctctcttgcacccatcattacttggcatctatttcacatatttgttctgctccttttctatgttctacatacccatcaccagtagaatgtgagccccccgagggcagggatttgtctcttcctcaccactctgtgcttttcacctagcgttgtatttgtcaaaggaatgttgagagaacaagtgttagctgctggtggatggcgtggccacagaagctcagtgtgggtgttgaatgtagcaggacctgaatgggtggccaaggcggctgcaccatgtggtgctggctagggtgggtgcctctgacttgggctttttctttgcaggtgtcactcgagaaggtgcttggcatcacagcccagaacagcagtggcctaacctgtgaccccggcacaggccatgtggcctacctggcagggtaagcagataagggcctcgacgtctaatcattgctagggaatttggagcttggaacctgaagccatccgtaaatcgctctgagcctcatatttttcacctgtagaatgtggagaatggggcctgcctctgagagctgtggagaggattccatagccccctctctgtctagaacagttcctggcatgtagtgagtgcaatgaaagcctttattatgactacaggggggaggtgacagcgattctgggaaagacaggtgattaaagtccacgctgtggtgtcaggtaacctggatttgtgtcccagctctgccatgtatgctgctctctgagcctcttcctctgcctctgtaaaacagagctggtgaccccctctgcttgcatagttgagaagactgaagaagatgctacagctgttcattccataaatactcatgtagcctggcactgtgctaaggacgtcccctctctgggtttgtttccttatctataaatgggcctaaatagtcgtgacctgacctggcagttgtgaggatttaaaacaattacatccctctttctctctttttgttttgttttgcttttttgagacagagtctggctgtgttgcccaggctagaatgcaatagtgtgaataacagctcactacagccccaacctcctgtgctcaagcgatcctcccatcttcacctcccatgtagctgggactacaggcacatgccaccacagccagctaattttttttagtggagatgagatctcactctgtcgcccaggctggtctaaaactcctgagctcaagtgatccctcctgccccatactcccaaagtgctgggattatagccagcttaaggtcttaattagcctagggcctgacagacattacctcagaggaagtgttggtttctatttaagaacatagcaatgttaaagtgccctagaattctcagcgtaaacacctggaggagggggaggaggaggagaccagagagaaccgagggagcttgtttatttgtgggcttttctggtgggaatagaatcatcccaggaccccaacactccccacagttgaggcacattttcctctttcttcccagctgtgtggtggtgattttggaccccaaggagaacaagcagcagcacatctttaacaccgccaggtaggctgaggcctgggcccggggcaggggtggaaccaggggcttggcacgcctcccctcccctacacagcctggagatactcatgggtaggtgctcactcattcacttacatgttggctcagcagcattcgcctgtgctgggtgctgttccgtgtgctggggacacagcagtgaccagaggagacgagaatctctgctggctagagcgagacagactgtaaactagtcagcaaattacgggctgatcatgatcagtgctatggaggaaatgatggaggatgtcttcgggcaggtttgtgggcagagaataggaggaaagccttatcagaaggctcagggaacgctgccttgactctgagacctgaaggaagcgagagggtgacccataagaagctgtagggagagcgcttcaggcagggggcacaggaagggcaaaggccctgcagtggttaagaatctccggcgctttagaagcagccagggatctgggtgcctggagaaaggagcagggaagatgaggctggaccaggcagaagccacatcccgtaggccttgcagccttgtagagggtctgcatagcatgctgagtgcagagagcagccacaggagggcaccacaggccaggaatgtgcttttcacccccagccctccagcagctctattccctgctttgcttttctccacaaaatttgctcccatctctgatatgctgtccagtttcctcattgatggtattcactgtgggtctccctcagtgtgagcactcttgagagcagggactttctctgagttcatttctgtgtccctagcaccaaagagcagtatctggcatattgatggctattttctaagagaaagacttaacatgatttgggttttagaaagatcccttcagctataagtttactggggaaggacccgctcctctgccttggggctaactgatcactgctaccctggggatgtggtcccaatagggctgtgacctttggaaggcacaccatgtccctccttggcatagctcaggctcagctcctttggcccagttctccaggtggatggataaggagtgggttttctcctgcccttatggtccctaaggtacggtccttaagctacggcaggttcttgttatctgacagaagtgcattccctcttgaaagtggctttttggaccttttgctcctaactgtgggttctgttactggtgataagggcagagctgggttccattcctggctcaagcgtctattcactgtggaatctcaggtgagacacttctttcagagccttggtctcctctgaaaataaaatagctgcctccaactgggagagcattcataaggcagcagctacaaaccagagtcacacacacttgcccaatatagtatgttttaaaggttggataagtggacaacatttcaagttttttaacacaaaaatccaaatgtcccttttgtttggagaagtgagaaattctctggcctctggggcccaaattcccctgtggcagtgaggggctgagcttagtgaaatttgtcaggcccgttgtggccagttcctcacacctgtgttgcctccctaatccctgtaggcagtggagtgggtggcctggatctatagtagatggtatgcaggtgtccgcccttggccaccagtgggtgtgcattaggaggtggtgtggccagtgtggggattttcactccaactgcatatcagaatcacctggtccctgtgcctcaccgcccccccaccgccacgcaagagaaagccaaatcagttgatctgggatgaaacttgggcattggcaattttgagactttttatattgaaataatttcagacttagaatagtacaaagagctcctatatacctatgtacctttcacatatttcacaaatgttagcttttttttcttttttttttttggacacagagtcttgctctgtcacccaggctgctggagtgcagtggcacagtctcagctcactgcaacttccacctcccgggttcaggtgattctcatgcctcagccccccaggtggctgggaccacaggcatgtgccaccatgcccagctagttttttgtgttttagtggagacggggttcatcatgttgcccaaggtggtcttgaactcctgagcttagacagtctgcctgcctcagcctcccaaagtgctaggattacaggtgcgagccactgcacttggccaaatgttagcattttaccacatttgctttatcattttttgtctatatacatattaatttgttctgaactatttgagaatcagttgtagacatgatgcccctatatctctaaatacttcacgccaggcatggtgattcacgcctgtaatctcagcactgtgggaggccttggaggcaggaagatcatttgaggtcaggagtttgagaccagcctggggaacatggcaaaaccctgtctctactaaaaatacaaaaattagccaggcctggtggcaggcgcctgtaatcccagctactcgggaggctgaggcaggagaatcgcttgaacccgggaggcagaggttgcagtgagccaagatcatgccactgcactccagcctgggtgacagagcaagagtccgtctcaaaaaaaaaaaaaaaaaaaaaaaaaacttaatcaaataaatacttcagtgtgtatttcctacaaaaaaaaatgacaatctttttaaactgtaatacatccagcaaaatcaggaaatgaaaattgatatatcactctcatccactccccagagggcaccattcaggagtcagcctttgtcccatgaatgtcctttatggccaaaggattctgtctagaatcacacattgcattgagttgtcccctcagtctctttcaggctgacgtggctcctctgtcttttcttgactttcaggatcttgacatttttttttttctttttgagatggagtctctgtcgtcaggctggagtgcagtggtgggatcctggctcactgcaacctgactccccagttcaagtgattctcctgcctcagcctcccgagtagctaggattacaggcatatgccaccatgtccggctaatttttgtatttttagtagagctggggtttcccca[136 bp omitted]cactgtcgcccgggctggagtgcagtggggcgatcttggctcgctgcagcctccacctcctgggttcaagcgattctctgcctcagcctcctgagtagctgggactacaggcatgcgccaccgtgcctggctaatttttgtatttttttttagtagagacggggtttcactatgttggtcaggctggtcacgaactcctgacctcgtgatccacccgcctcggcctcccaaagtgctgggattacaggcttgagccactgcacccggccaatcttgacactgaggattgtagacgaggtattttgtagagtgtcccagcatttgggtttgtccaatgcctcctcacgggcagactcaggttctgcatctttggcaggaacagaccagaaggggtgctgtgttcttcctggtgcctcctctcaggaggtctcctatgactggtggtgttcactgggagcacttggccaaggtgttgcctgccagattcctccacttcaaagcctctcttttcacctttgtgattagcaggtatcctggggacatctttcctgagacagtgcaaatattatcttgttcctcaccaaactttcactcaactaatcttaggctttgacacttttcagatgctccccagggaaatctaatgtacagccaggactgagaactactggcttagaggtcagggctctgccctgtctggttaggtaactgcaggcaggggacttccttgtgttgcagtcacctcatctgccaagttggttcatgagagccctgactccatgaagcatgcttgaggaatcagtgcactgatggccagacagcatttgccagagggccaggcacaaggtcagggcatgcgacaggttagaggtggctacgggcaacagaaacccctccacagcatggcttaaaacccaagagcatgctcttcctgcatgtcataagtccagaggtgggcagcccaggggctgtgtctctgaacgccacattttttttttctgtctctctttttgagacagagtctcactctgttgcccaggctggagtgcagtggcgcgatcttggctcactgcaagctccgcctcctgggttcacaccattctcctgcctcagcctcccaagtagctgggactacaggcgcccaccaccacgcctggctaattttgtttttgtatttttagtatagacagggtttc[144 bp omitted]ggctggagtgcagcagcacgatcttggcttgctgcaacctctgcctcccgggttcaagcaattctcctgcctcagcctcccgagtagccgggattacaggctcctgccaccacacctggctattttttgtatttttagtagaggtggggttttgtcgtgtt[132 bp omitted]tgaggcttctggtcttgaagtcacttcatggcccaagatggagttctggctgtcgtgtgcgtatttcaggaggggaactggtaggaagcagggcaaagggttccctttgacgagtatttcaggaagtcccacacagcatgtcagtttacttctccttggccagactaagtcatgtagctgtacctgcatagttgcaagcataaaactggggttatgtcagtaaggaaagagaggcgagtggatatccaggaggcagcttgccctgtttgttgcagtaaggagccacgggaagcctgggaagcaggttgacttgatgatgaatattccatgaagttgccaaagtctcacttagcgacatttacttagttatctacacaccaatttaccatctcacgtagggagacaattattagattgttaaggaacaaaggtaaaaataagattaaaagagagaagggagtagaaggaaaccatacaatctgggaacagtgaatcttgctgccagaaacctacgagctagcctgttcattcagtgcttgtgcaggctagctaggagtatcagaaacattttggctctttatggattttccagaacaccttgagtatttagcagtggagcacaggctgcaggctaccttgatgtgatgcctgccaggatcctcccatcagcaccacccgtttagttaggccaggcctgtaccatttcctgcatctctatttctcagtgttacagggtggatagggtcttaggatacccactgcggcagagggagaagaaagcagggtccgcatacagtgtctactccatttgggtttggtgtctcagggcggaaggggcctttgcatttacccccatttctctgtgtgctttgctgggcacaccagcggcactggctctgtgggagctgcttgagctcacctctgctggcctcttccgaggcttgggaggcagaagagggcagagtcctatcagagtcgccaggatggggtctggctggccaccctcagcggaaccagtgatcagctcttttctttatccccaggaagtctctcagtgctctggccttctcccctgatgggaagtacatagtgacaggggaggtgagtcgtgatcgtgactgagtgggagtcgggggctggggggtcttggaagccattccttctgctcccggcaggcctgggagtccctggaatagctccttcctgggccagaacagccctgtagcagatgggggaggtggcttttgggcacatcctgtggcaatgccatcttcggccttgacaaccctctagccctgcccagtacagagcccagcagcagtaacgaccccaccttccctagaatgggcataggcctgctgtgcgcatctgggatgtggaggagaagaatcaggtggcggagatgctaggccacaagtatggtgtggcgtgtgtggccttctcacccaatatgaagcacatcgtgtccatgggctaccaacatgacatggtgctcaacgtctgggactggaaggtaagagccgaccagcaggcctgtggcaggcagccagctgccacagcatcctatgtcttgggcacagggagagctacatgagaggacgcagtaaagtgctcactcacccaacagataacagctattgagcacctgtgacatgctgatcccttattgtagggcacaaggcaggctcccagctagaagcattatacatatttttatattgaccagctgtgaccttaggcaagtgacttaacatctctgtgagtctgtttcctcctctgttagatggatatagtagtacttatcttgttgagttgtgagactttaatgagttgataagcactggaaggctgggctttggaacagctgtggagctggcagaagtgggtaccaagtcctggctctgcccataacccactatgtgaccttgagcacatgacatctccccctctgagcctggtagggttggggagaagcgcctccctcgtggggcttttgagggattgaggaaatttcatgggttatcctgtgaagggctcagggcagggcccagagcaggagccccatctgtgacagccataggttgtgttgtccttacatcccagccgtgactgtccccaataccatgtgtgggctgcagagcttagacccttggagagagctctggaacatactgtcccatggggaccattccaagcctctgtcccttcctctgtcggtgaggaatgagcagggtgccccacataggtttccccatacagcagctccctggagggtcccaggaagacagacttggagtggggacgagcagggagttccagcctgagggcaaaggcacaaacagtccagtggaatgagtgctggcatgagcttctctgcacttattcttccagaaagacatcgtagtggcctccaacaaggtatcttgtagagtcattgccctctccttctcagaggacagcagctattttgtcactgttgggaaccgccatgtgaggttctggttcttggaagtctccactgagacaaaggtgagtttctgtccctgcccctttagccaggccctgagggagtcaccatcggtggcagcatggtctcctgtttctccctgagatttgagggcagcggtctcgggccatttggcctctcaggggcccagctgctgcttctgggcctactctcagggtgctgatgcacaggccctgccaggaaccccctgaccctgggaccagctctcattcttggactgctgctgtccagcccctctgtccagagtggcagggttctagtgttttcttcccttctccatttggaagagcttcttagagttctcctgttttgttgtgtcctatcatctggtcatgcagggcccagctgtgtggacaagtatctcactacgccctctgtgtctccaggtgacgagcacagtgccccttgtagggcgctcgggcatcctgggcgagctgcacaacaacatcttctgtggtgtggcctgcggtcggggccggatggcgggcagtaccttctgtgtgtcctactcgggcctcctctgccagttcaatgagaagagggtgctggagaagtggatcaacctgaaggtaccacctccctctctgccatcagctggacagactctttctcgtgatatgtgtctgcaggggtgctcatcagcattgaccacacaggttctgcttatgtgactagtggtgaatgacgcccactctctgagcttaaggttccacatctgtaaaatgggagtactgctgccctccccgcagagctgataaggaagtcacgtgagataacataggcaaggcagtgagcacggtgcttggtaccctgaaatgggctcaaggtgacagttgttttcccatgactatttgatctacttcacatttcttttctcctttgagcactctggctggtagaggattgcatttttttttaattaatttatttttttttattgatcattcttgggtgtttctcccagagggggtttggcagggtcttaggacaatagtggagggaaggtcagcagacaaacaagtgaacaaaggtctctggttttcctaggcagaggaccctgcgggcttccgcagtgtttgtgtccctgggtacttgagattagggagtggtgatgactcttaacgagtctgctgccttcaagcatctgtttaacaaagcacatcttgcaccgcccttaatgcatttaaccctgaatggacacagcacatgtttcagagagcacagggttgggggtaaggtcatagatcaacagcatcccaaggcagaagaatttttcttagtacagaacaaaatgaagtctcccatgtctacttctttctacacagacacagcaacaatctgatttctctatcttttccccacctttcccccttttctattccacaaaaccgccatcgtcatcatggcccgttctcaatgagctgttgggtacacctcccagacggggtggtggccgggcagaggggctcctcacttcccagaaggggcggccgggcagaggcaccccccatctcccggacggggcggcggcagggcggaggcggacccccacctccctccctgacgggccggctggctgggcaggggctgacccccacctccctcctggacggggcggctggccgggcgggggctaaccccccacctccctcccggacggagcggctggccgggcgggggctgactccccccacctccctcccggactgggcggctggccgggcgggggctgacccccacctccctccgggacggggcggctgctgggcggagacgctcctcacttcccagacggggcagctgccgggcggaggggctcctcacttctcagacggggcggctgccgggcggaggggctcctcacttctcagatgggacggccaggcagagacgctcctcacctcccagacagggtcgcggccgggtagaggcgctcctcacatcccagacggggtggcggggcagaggcgctccccgcatctcagacgatgggcggccgggcagagacgctcctcactttctagacggaatggcagccgggaagaggcgctcctcacttcccagattgggcagccgagcagaggggctcctcacatcccagacgatgggcggccaggcagagacgctcctcacttcccagacggggtggcggccgggcagaggctgcaatctcggcactttgggaggccaaggcaggcggctgggaggtggaggttgtagctagccaagatcgcgccactgcactccagcctgggaaacattgagcactgagtaaacgagactccgtctgcaatcccggcacctcgggaggccgaggctggcggaccactcgcggttaggagctggagaccagcccggccaacacagcgaaaccctgtgtttggtggagaccaaaaaaatacgaaaaccagtcaggcgtggcggcgcgcgcctgcaatcgcaggcactcggcaggctgaggcaggagaatcaggcagggaggttgcagtgagccgagagggcagcagtacagtccagctttggctcggcatcagagggagaccgtggaaagagagggagagggagaccgtggggagagggagagggagaccgtggggagaaggagagggagaggaggattgcattttttaaaaattggaggtaccattgatttaataacttttcagtcaaaaaagactacacaaaatacataaacttttatttatttttatttatttttactttttttttttttttgagatggcgtctcacttgttgccaaggctggagtgcagtggcgcaatctcagctcactacaagttccacctcccaggttcaagcaattctcctgcctcagcctcccaagtagctgggattacaggtgcctgccaccacgcacagctaatttttgtatttttagtagagacagggttttaccatgttggcctggctggtctcgaactcctgacctttagtgatccatccgtcttggcctcccactgcgcccggccataaacttttaaactaaagcatgatctatcgatacattgcagagcttctttcctttagtatctgaaggtttgagtcaaagctgttttcccatctggaatcagttgcccatttggctatccgcccgagcgttgtggtttcctctcctgttcctggcctgcctttgtgactcactctggagatcaccttcgaggttaatggcttgtggaagagttccaagttttatctctgtcctagttggttaaacatcattttctctttttcaagcaagtgaaaagctttcaatagatagatgtttatttcctaagcactaaatgactcataaattaagtccctgtagatttggaaaaactccttaaactgtatctagaggtctagcacttcctagtaggatagacagtcctttctagatactgtaacttttttctgtaccgctttggagtacagtctttatgaagttgtttgtaagcaaaagggaataaaatttaagcctaaaggctgggcgcgatggctcacatctgtaatcccaatgctttgggaggccaaggcaggtggatcacctgaggtcaggagttcaagaccagcctgaccaacatggtgaaaccccatctcaaaatacaaaaaattatctgggtgtggtggcggccgcctataatcccagctactctggaggccgaggcaggagaatcacttgaacccaggaggtggaagttgcagtgagccgagattgtgccattgcactccagcctgggcgcaacaaaaaactctatctcaaaaaaaaaaaaaaatttaagcctaaaattcaaccctgttactacaagtgacttacctgaagttgcagtctgctgaacaggtattttccatacacagctacgtttctctgtagacagcagtgacaattctgtttccgttcatgcctctgcctacctgctggcacatgtctttcaatagcagcagtatgctatatcctgatttcacaaatcttaaaatatgctaaaatgggtgtcttagacccaaggaactgtaagtcttctctggaggcctaaggctgctctgtcagtccccatatccccgggccaggccacgtgaagcaccaaatccactggggtcccttttgcccctacaggtctccctgtcttcctgcctctgtgtcagccaggagctcatcttctgtggctgcacagatgggatagtccgcatcttccaggcccatagcctgcactacctcgccaacctgcccaagccacactaccttggggtagacgtggcacagggcctggagcccaggtactgccctgtggggagagggaatgggaggggcccacccagagtctgtccactggcattcatccatgcttccagatccatctatctgtctgtccatcccacaaatacccatcatgactctcagccctgggcattacaaagcagaaaagtccttgccttccgaggcaagcctcacagtgagaagtgaggctgggtagggggaagaaacagtgagaaaacaaaggaataatatcatttcagatagcggtcagcatggtgaagaacagtgcagagcaggtgtgaatgtggcggagtgtttccatccacatggctgacccctactaagtggctgctaagtgccagccctgggctggaagcaggacatgcctattataatgaagcagcaaaatctctgcctctctgcagtatagcaagggggctcgatgataagcaagtacacgaaaaagataatttcaataggcatgagtgctttggggaacacagcagggactcgggaaggagagtgactggggtgggctgtgctgattgggtgcctggtgagaaggagctgctgtgtggagagctgggtcccagcagttgaggtgacagcacactgggcttgttacgttgcaggaatagtaagggactgtgtggccagagcccagtgtgtccggggaggatggtgggagatgaggccagtgtggggcgcctgtagtctatcctcaggtcagtgggcagttgctggggtttcgggcgttggggtaaatgaccaggccttacatgttaggtccctcagctgctgtgtcgagagtggatagaagcactaggctgtggctttcttctcctttgttgcaagtctgttttatggaattgggggctacctaaccagggggtgccaggtgcctagggctgcctctttgtggatttctggatgctagctcctgggtgccttttccacgacagggcctgaacaggggaactgggtgtcatgaaggaaaggagggggcgagcaacccacaggcagtgttgtgttgtagtagtcgggctcacagctctgctgtcttctgttgtgctctgtgaccttgggaaggtgactatacctccctgtgcttccgttttctcatgtgtaaaatacagtacctagctcttattgtggttgtgagaatttattgcaggtaaaactctcggcctggcacagtgtaaatgctcagtaaactgtagccttcatagggagaccccaggccaagggacagctccccagcctccttaggacacagaggctttttgatcatgcgttggtgaggccaagaagaggtgggacctgagatacatgcctattatctttctatgctcagagagagagcaggagcttgggttgggtgaaatgatgggcgataaatgttcataggaatcaaaaactcaattgctctcggggccaggcaaaaatttccggtttgtagcctctatatgaaaagcaaagcagaggaagagggaagagggaaaagtagaattggagcaggagagatggatggccacaaataccatgagggatggcattgccggggaggcatctccactgtcactagaggtggctgtcactactcagtgacattgatggtgattgattacccatgtggccttgttagcttcctcttccacaggaaggcggaagcagtctacccagatacagtggcactgaccttcgaccccatccaccagtggctgtcctgcgtgtataaggaccacagcatctacatctgggatgtcaaggacatcaacagagtgggcaaggtgtggtcagagctcttccacagctcctacgtttggaacgtggaggtgagccccccccccacccccttgcccctgcttggcctctgcacagttccccacagtttgggaacccattcagtaattccttcagaagatactcattgactccctcctatgcatcaggccctgtcctaggtgctgaggacacagacacaaaatccctgcccttaacaagctcacatttggatgggaaaggaaacctggaaacatcatcagtgaataacacgccaagcagcagtaaccctctgaagaaaaatgaggcggggaaggggaaggggaatgcaggtggtattctagagaggagaggggtcagggaaggcctccctgaggacatatgagcagagacctgcaggaaatcggggagtgagacctgcaactgctggggagaaccacaagcacagaggccctgcggcaggaacatgcactccacagagagctttgctgtggaggtcgtttatgtatttcactgctttttttaaaaaggagttgaagacggggcatggtggctcacacctgtaatcccaacactttgggaatctgaggcgggaggatcacttgagtccaggagtttgagaccagcctgggcaacacaagaccctgtctctacaaataatttttaaaaattagccaggcatggtagcacacacgtgtggtcccagctactcaagaggtggaggcaggaagatcacttgagcctgggatgtcaaggctgcagtgagctgtgattgtgccaccacactcccacactccagcctgggtaacagtgagaccatgtctaggaaaaaaaaaaaagttttgaagtttttattttctgagaatgaatttgtgggtttttaaaaattctctaaagttaaccaggcacagtggctcatgcctgtagtcccagcactttgggaaatcgaagtgggcagattgcttgagtccaggggttcgagatcagcctgggcaacatgaggaaaccccggctttacaaaaaatacataaaaattagccaggcgcgcctatagttgcagctactcggcaggggctgcggcaggggggctgaaaatttcttactgggaatgtttgtcctagagaaattgggttttcagtggccagattcaggatcgtgagaaagaactttgtccttttgaataggcagcattcagcctatgactctggttgaatctgtctgccttcatggggctgacgtttttgttgacagcactttttttccactcaaagaatgttttttaataacttttaaaattcctgtatgaaatttttaaaaatttgggataataggtgaaatattacagataaggctacagtccacattgatgacttccctgcccccagttctgctctctctcgccctcaccattatcaattttattatgggtgtcttcagttgattttctttgcatctccttattgtttatgtatatagctgttcaacaacagtatctgtggatagatcttttcatcagttctagaaaattctcagccaatactgcttctaccctcttctctctctttttttttttcagacggagtttcactcttgttgcccaggctggagtgcaatggtgtgatctcggttcactgcatcctccgcctcccgggttcaagtgattctcctgcctcggcctctcaggtagctgggattccaggcatgcgccaccacgccttgctaattttgtatttttagtagagacggggtttctccttgttggtcaggctggtcttgaactcccgacctcaggtgatccgcctgccttggcctcccaaagtgctgggattacaggcatgagccaccatgcccggcctattcgctctcttctaaggttctatctaactctaaggttctatctgtattcttcatgtttctgaaaataaaaatcacacaaaagatatgtagagtttatcaattattgttagcagctttttttcccccccaagacggaatctggctgtgttgcccagtctggagtgcaatggcacaatctaagctcactgcaacctccagctcctgcgttcaaacaattctcctgcctcagcctcccgagtagctgggattacaggcagccgccaccacgcctggctaatttttgtgtttttagtagagatggggtttaaccatg[136 bp omitted]tttattgagggttgcaatatggtgatattctaaatctataatttatttttattagttggactacttacgtgaagagatatttgctctcatctgccatttggtcacccagtgctatacttcatataggaaaggcaggagaaatacttgattctttccctttatttaccagttttcaagataatgaattggttccctatcctctaaaggtaactagttttatttaatatcattataaactcatatatatttaaatatatcagatatgttttaatctattgtaattattaactttattggagctcatatcatcccatctttggccagtgagagcctcttaacattggctcctgagccctttggacatgaccctagtatttcttgatagccaccttgctgcctgggatgccaatatgttccagtctcatcttgtacatttcctgtcacacatcaggaatcaaccatttctcgaaaagaccatgtttttttttttgggctgggtgcagtggctcatgcctgtaatcccagcactttggaaggctggggcaggggaattacccgagcccacgagtttgagaccaacctggccaacatggtgaaaccttgtctccactaaaatacaaaaaattagccgggcatggtggcaggcgcctgtagtcctagctacttgggaggctgaggcatgagaattgcttgaacccgggaggcagaggttgcagtaagccaagatcaagccactgcactccaatctgggtgacagagggagatcctatctcaaaaaaaaaaaaaagaaaaaagagaaagagaaggccagggtttttttttagtacaaattgggacttcagaatcacaggttgggtgttagggatgctcatcgctattgggtcgttcttccagaagcctagttcttaaggacacaggggatggtggaattagaatatccccagtaactcatttgctttttcccacattatacatgcaacagtctgagaatggacaacttttcaattctgaagatagttaaaacaattgtaatgcatatgttctctctgttctctccaatttttaaaatagttatactatatttacaggatctgaatatgtagccattatatactatagtgtctcccttttgacccctgtttattttggaatggggaattatatatgtgtgtatatatgtatgtgtgtgtgtgtatatatatatataaaatgataaaatatacatgacatcaagttcaccatttcaactattttaaattgtaccatttggtggcatttagtacacttacagtgtcatgcagccatcattactctctagtttcagaacattttcatcacccacccaccccaaaaaatcctgtatctgttaagcagtcctccccattccccactccccccatccatggaaatgactaatctgcttctgtctttatggatttgcctgttctgaatcttttcttttctctccttctttccttccttccttccttcctttttttttttttttttttgagatggagtctcactctgtcgcccaggctggagtgatgcagtggcacgatctcggctcactgcaagctccgcctcccgggttcacgccattcttcttcctcagcgtcctgagcagctgagactacaggcacacgccaccacacccagctaattttttgtatttttagtagagacgaggtttcaccatgttagccaggatggtctcgatctcctgacctcgtgatccgcccacctcagcctcccaaagtggtgggattacaggcatgagccaccatgccaggctgtttcctttcttttcctctttctttcttttttttttggatggagtctcgctttgtcacccagactggaatacagaggcacaatctcggctcactgcaacctccacctcccgagttaagctattcccatgcttcagtctctagagtagctgggattacaggcacatgccaccatgcctgatgaattttttgtattttagtagagacagggtttcaccatgttgcccaggctggtttcaaactcctgagctcaggtgatctgcccgcctcagcctcccaaagtgctaggattacaggcgtgagccaccatgcctgacctgaatattccttataagtgaaatcatagactatgtgggcttttgtgcctggctttcacttagcataatgttttcaagatttatccatgttgtagcatgtgtcagcacttcatgcctttttatggtggaataatatttcattgtacggatagaacacattttgttctctgttatcagttgacggccacttgggtttttttctaccttatggctgttgcgaataccactgctatgaacatgtaagtacaagtttttttgtttttttttttttgaaacggagtctcactctgtcgcccaggctggggtgcagtggtatgatctccgctcactgcaacctcaggctcccaggttcaagcgattcttctgcctcagactcctgagtagctgggattacaggcacgcaccaccatgcctggctaatttttgtttttttagtggagacacggtttcgccgtgttggccaggttggtctcaaactcctcgcctcaagtgatttgcccacctcggcctcccaaagtgcagggattacaggcgtgagccactgtgcctgacgtagttctttctttcagttacatcactttgtttctgagtttttgtaggttgtttttcataccttggatcattttttaaatatcttttaccttcttttgaaacagtaggcccagcgtggtggctcacgtcggtaatcccaacactttgggaggccgaggcaggtggatcacctgaggtcaggagtttgagaccagcctggccaacatggcaaaaccctgtctctgctaaaaatacaaaaaattagctggccgtggtggcgggcgcctgtaatcccagctacttggggggctgaggcaggagaattgcttgaacccgggaggcagaggttgcagtgagccaagatcgtgccattgcactccagcctgggcgacagggcgagactctgtcaaaaaaaaaaaaaaaaacaaagtaagttatagtttttatctttttttgtgaaaatatgtttctgctgtgcttttttttttttttcttttttaagagtaactattggatttgaccttggtcctttcctgttgttcatttttatgtgataccagtttttctgaaattttagaagttggtgtgcttcaggacagattttccaactacacaagaagaactctgtcttttcttttttttgtgggggtggggtggcatgttttgttttgtttttgaaaaggagtctcactgttacctaggctggagtgcagtggcatgatcacagctcactgaagcctcaacctcataggcacaagcagttctcctgcctcagcctcccgagtagctgggaccacaggcatgcactaccatgcccagctaattttttatttttggtagagatgggatctcattatactgcccaggcttgtttcaaacttgggctcaagcagtcctcctgcctcagcctcccaaagtgctgggattgcaggcttctgttatttttatactgtgttaaaatatggcagcctgctttctgatacttcctttttgtggtcctctttatctgttatgtctcttctttcgtctcaatctcctctttactttatttcttctgtccctgttgtgattggtcaatttcatttctactcttagcagtttctcttcagtgtggagctttgtcctggaaggacaaagttcacaggatcttctccagtccctttaggccttaccccttgcactcaactgctgttggggtggatgaaaccctcctactttcagctgctgttcagtttggcccagtgtgctttccaatgaacacctcttggctactttggaattatcctgttgctgggtctgtcagatgccttattacttctctgtctcccacatgcatgctgatgatatgtaggtcttgtgattggtggtggtttgtcccactcacttgtattttggggtttatgggagtattttgtcactgagttttgctataaatgttgtctgtaggtttgggttttgctatctggttgatgtttttcttatgtcgagattttgggagattaaaaaaattaatgccgctactatcatcttcccagttctcaatcttccgtattttgaaatctctttatatggtggctctttgtccttctcagcttcattctaaatatctttagttttgtctttcagttcacttaattttctcctcagttatatctaatctttggtttttaatgtttttatttttttattattttttttttgagacggagtctccctctgccgcccaggctggagtgcagtggcgtgatctcggctcactgcaagctccgcctcccaggttcacgccattctcctgcctcagcctcctgagtagctgggactacaggtgcctgccaccacgcccggctaattttttgtattttttttttttagtagagacggggtttcaccgtgttagtcaagatggtctcgatctcctgacctcgtgatcctcccgcctcggcctcccgaagtgctgggattacaggcgggagccaccatgcccggcctattttttatttttttatttttatttttttgagatggagtttcgctcttgttacccagactggagtgcaatggcgcgatcttggctcactgcaacctccgcctcccaggttcaagcaattctgctgcctcagcctcccaggttcaagcaattctgctgcctcagcctcccgagtagctgggattacaggtgtgcaccaccacgcccagctaattgtgtatttttagtagagacggggtttctccatgttgaggctggtctcaaactcctgacctcaggtgatccgcccacctcagcctcccaaagtgctgagattacaggcatgagccaccgcgcccggccaatatgtttttattattcatttctagaagctgttctgttttggtctttttcagccctgcttggttaatctttataatttctggttggctgcacacttttaatcttgtcaaaattatcttttagttcttcaaacatattgaatgtagttattttatattctgtctgataattccaatttgggtttttttattttgtttttggtttgtctgtctgtttgttttgagacacagtctcatatgttggccagagtagacttgaactgctggtctctagcagtcctcctgcctcagcctcccaagtagctgggactacaggcatgcgccacctcccctgatttaataattccagtatttaaagtcttgctagactctgttgcttctgctgcttcttgctgatggtacctcgttttcttttgtgcttagtcatgtttgattgagttccacatttcccttggaagtttatttgagggtatgtgttaaggcctaggctgaaggtgggacatggatgatatatggtagcattttgtgtcctttttttttcttgtttatttttagcatagaaggtattgcacgatacctgtttatctttaacttactttttttttttccatgaaaatgcaacagtaagtcatagtgctgtcattgagtcatcctttgccttgtcctctgggaactgtaggtgtatcctgagtttgaagaccagagagcttgtttgccatcaggatcctttctgacttgttcttcagacaacaccattcgcttctggaacttggacagcagccctgattctcactggcagaaaaacatcttcagcaatgtgagtggcttcctttgtgaaccatctttcaggaggaacaaagacctactgtaagcttgaatgcaggggcaggagagagtctgatggaccctagatgttaggttccatgagggcaagagccggcaaccaaggcaggtccctctctgcatcactgcctcttgtttctctttctcctgccccctctctgaggtggcacgctctatcctctctgattctttgccagttggctcctgctctgcagatgtgtggacgtggccactcccggcagcccaacacacccagcccaggtgaaattgcttcctaagtcttgagatggaattccctgggagagcacctgatgagccagcccattcagctgccacacagtgaggcctcacgggggtatgggcagaatgctggcgagagccatgatgggaggctgggaagaaaagtttgctgaggaaattttggttagtattgcaagcccagtgagagggcgtctctggggagctgagacctgagtcatgcattcatttattctgcagacacttattaacgtccatgccaggtgcttggctacatgctagggacacaacagtgactaagactcttctgtcctgtggcacacacaatctagtgagggccgacagtgaactgacagccgaccatgttaatgcacaatcacaagtgcgaaaagcactgtgaaggaaaatgtgcagggtgctagtaggacatagagcagcagcatgtgaacttatctgggacatccggagcagcttcccgcggaagggacagctaagttgagattgggaagagtaaagagggaaggggagagggtctatacttagggaatagcctgtatgaaggccctggggtgggaaacagctgggtgaattggaaaacctgaaagaggccagtgtgattggaactaaaaagaccctccatgcaggaggctgtagcaggtgccctgcaggtgcacctttattactcccctcattccctacccagtgctaccatcgtctcctctgtacctgtgacatacatgctgtttttggctgcacacaatagaaaaactcaaaacaagaggtaaaagttaggtttctgactcatgaaagtagtctgaaggtaaccagtttagaccgttctgcaggaagcccttagggatccaagggccttccagctctctactctgtcatttgagggagcaggctatgtcctcatgacccagtgtggctatgggggctcctgctatcatatctgagttccaggctgcaggatggagaaaagacagcagaagaatacgtgcttgctttatatttaatagttcagaatttattcacatattcttatctagctgcaggggaggcaaggaaataattattctgattggtgaaactcccagctcaaaattagagttgtattactaacgaagaagagactggctatggagggacacgatttcagaggtgcttctgagctgctcgtgctgacctcagccctgtccttcctgcagaccctgctgaaggtcgtgtacgtggagaatgacatccagcacctgcaggacatgtcacacttcccagaccgggggagcgagaatgggacacccatggacgtgaaagccggggtgcgggtcatgcaggtcagtcctgacggccagcatttggcttcaggcgaccgaagtggaaatctgaggcaagtgggccctggcagtgtccagtgtacacctcccagctccagctcaggttctcagggcagtgggcagaagccctggccttggcacctcctgctgcccattgggaatgaggggctgtgaatagtaatcccatgaacagctcccattgggaacttaagctcgtaagaggcttccagaagggctgagagcagagtaactaccaggacctcagcagctagggtgtgcagattttgcctatagagtgtacaggcaagctcacatgactctagggcagcgtgacactttcaccagccacatggtaccagtgctgaactgtcaccgaagatgccagctggaggagggtcctggtggctctgggagaggggctatgagggtgggatagctgagagttcaggctgcttatgtgccctgttgaggtttggcaggatgttaccaacccagtaggtgctagtgggacataggccctgttgctgggaccaggtttaagatgacaaatgacagctgtgaccacctgggtattggagccactggggaatggaggagagttgggggaaactagaggggacataaaggggcagcagccaccaggcagccccaggagagtaggctacaagttttcaaactttcctgttgtcaagaagagcagaaagtgccgatttttttctgtgaaattcgataatttttaaatattggcacctgttttgatatcagtcactgtatgagaccagctcagtgtgtcagtgagctgcttacattgacatggcactgtctggagtggcaaaacggtaccaagagccaacatggggatagtgctcttcccccttggtgggcgctggcctgagcactgtgttgactgatttaatcctctcactgacccctgatgtaagtgatgttattggcacaaggtgtctggagtaagatcacacgggtagaatgaagaagctgggatgactcgatgactgatttcatttggggagaatcaggaaggtctagatttgagactcttttaacaatgagagactggaatcaaatgttctcatccatagctcctatcctggactatgacctctggcccctagcccctggcccctgtcctaccccagggaccacctctgatgcagccctacgtaaacacctgcccccctagaagactgtcctagatccctggggctctgttctggcccaggcaccacaaggggctgctgcctgctgaggtgctccctggttcaacacggctccctttacgatggcaggtttctaaatgagaaaagtggttgtgcatgtctagagtatttggccatgataaggggttctcattgttggtggcctggccattctgacctattctagaagtggtagagcacatggggctggggtgtggggcttcagcgggcggtgtgtgtctcccaggatccacgagctgcacttcatggacgagctggtcaaggtggaggcccatgatgctgaggtgctgtgcctggagtactccaagccagagacgggtgagcccgcagcaggggtggaatgggggtcaggcagggaggcagcccccctggcagggccacagaaaggggtagttggtgtctggtgggactgtggatgacagctgggagttttgtgttcggtaagggcccctgtagctggaccctgagaccagagtggctgggacttcagaaagcaagacacccgcaggcaggactcagcttgacttgcccgctgctggtgccagcacccaagccaaaggggtggatgtatgaatgagtgaattgtgaatgagaagatagattgattgttaggcattattttcaaaaagtttgaagcctatagaaatattgggagaatattataatgaacaccccataggcttcacccaaattcctcaattttttttttgagatggagtcttgctgtcacccaggctagaggggagtggcaccatctctgctgactgcagcctccacctctctggttcaagtgattctcgtgcctcagtctcccatgtagctgggattacaggtgcctgctgccatgcctggccaatttttgtatttttagtagagatggggtttcaccatgttggccaggttggtctcaaactcctgacctcaggtgatccgcccgccttggcctcccaaagcgctgggattagggcatgagccaccacacctgacctttttttttttttttttttttttgagacaagagtctcactctgtcgccctggccggagggcaatgacgcgatctcagttcactgcaacttccgcctcccaggttgaagcgattcccctgcgttcaagcgattctcctgcctcagcctctcgagagtagctgggattacaggcacgcccccaccacacccggctaatttttgtatttttagtacagacggggtttcaccatgttagcctaggctgaaggctaggaccatagtagggtctccagacctcatggtcctcttcattaaaacaacagaaaattccttctgggccatcagatgagatcatgagataggagaagatttccaagtgaagatttcgtttgtttcaagacagagtcttgctctgtcacccagatgatatatggatgatatatggtagcattttgtgtcctttttcttgtttatttttagcatagaaggtattgcacgatgctggtctcaaactcctgacgtcaggtgatccacccgccttggcctcccaaaatgctgggattacaagcgtgaaccaccatgcccggctcctcaagatgttttctaggctgggcacggtggctcatgcctgtaatcccagcactttgggagttacagagttggtggagttatatcctgatgtgattttccccatgttcttctttcgttctctcatcccccatgctgtgtgccccaccaacttgtcttgaaacatatcttcactcggttcgcctctcctgatctcccctctgcctcaggtcatgttattaggcctcagacatagcaagtgaccagagtagggaaggctggtggcagatgggagtctggccacaggcagtcaataggacctgaacaaggcccaggtagccagacctcagagggtgagaggacactggttttggaagaggctgagaggttgccagggctttacccagcacagacccagcaggcaagagcgctgggctctgctggggcgtctgctgtggatgtccctggaggagcgtccatgcgcccatcgagactcatcctccctgagctggtggtgaggaggtgaaatgccagggtgtgggggctctgggaaagaccacacagagctaagggagtggcccttgccaggcttgggccaagttggctacagttgaagaaccaaagaccccttctccgaggactgggcagcttggtcacactgcccttctgggaggccagggcacccacgcagccttcaggaaccagtctcattctctcctctcacagggctgaccttgctggcctcagccagtcgggaccggctgatccatgtgctgaacgtggagaagaactacaacctggagcagacgctggatgaccactcctcctccatcaccgccatcaagttcgctggtgagcccctttcttcccgctccctgcgccttgctagctaccctgctaaaaaaggattcattctttcaactctcctgtaaaatatatatccaaacaagtgaatacagtatctgtgtacagtatacagaataatgactggggccgggtgtaatggctcacacctgtaatcccaacactttgggaggccaaggagggtggatcacctgaggtcaggagttcgggaccttcctagacaacatggtgaaaccccgtctctactaaaaatacaaaaatttgctgggcggggtgttgtttctgtaatcccagctactcaggaggccgaggtgggagaattgcttgaacctgggaggtggaggctgcactccagcctaggcaacagagtgagaccctgtctcaaaaaaaaaagaataatggccaggtaccatggctcacacctgtaatctcagcactttgggaggccaaggcaggtagatcatgaggtcaggagttcgagaccagtctggccaacatagtgaaaccccatctctactaaaaatacaaaaaaattagccaggcatggtggtgtgcacctgtaatcccagctactcgggaggctgaggcaggagaattgtgtgaacccgggaggcggaggttgcagtgagccaagattgcgccagtgactccactccagcttgggtgacaatgcgagactttgtctcaaaaaaaaaaaaaagaagaatataggccgggcgtggtggctcatgcttgtcatcccagcactttgggaggctgaggcaggcagatcacctgaagctaggagtttaagaccagcctggccaacatagtgaaaccccgtctctactaaaaattcaaaaaaagtaaccgggcatggtggtgcacacctgtaatcccagctacttgggaggctgaggcaggagaatagcttgaatccaggaggccaaggttgcagtgagccaaaattgtttcactgcactccagtctgggtaacaagagcaaaactccatctcaaaaaaaataaaaataaaaaataagctgggcgtggtggccgaagtgagtatccacagttcttaggagcaaggtttgaactaggacgttgttgatagcagagactgttctaattgctcatggtcgtaatattgttaaatacggtacttggattcaccacgtgcaggttaagaagcagaacattaccagaggcttgcaggccttctctgggtccctcccaggttacccttcctcccttatatggggctcactcccttctgtgagccaatgactcctccttgagcaacatctaatacttgtatgtcaggcctggaccctctcaaatgtcctgtcatgaaggagcatgtgtgatgtgcccagactcagagttttatatttgttctgtcatttcatcctcaccaaactgttattctgtaaagaaatgagacggccgggggcatctcacgccattgcactccagcctgggcaacaagagcgaaactctgtctcaaaaaaaaagaaatgagaataataaaagcaagaatgtttctaatgcttaccatgtggcagtccctgttccaagggcttcacatcactctccagagaaggaactgtcaccatgcccattgtacggaccggaagttgaggctcaaaggggaggcccaggttcagagcagtgtttaacagctttgaccttggcaccagagaatgcctgggttcagtcctgcccctgtcctctctgtgtgccttgggacaaggactctgtgaacctctgtgttcatgcttgtccagtgggatgggtggtgagcattcaggaagacccgctacatgcatggggcctggcccaaggctcatgtggatcttgcagttgatcctgatggcacgagcctcccagcctgtctccactggtcgctgctgcagtcctgcctctactccgctactcaagtcacctatctcaatcccagactggagagggtgtcccttctttgtccccagcctttgtttctctatatgcccttgctctgcagagcctgccttggccacagctccacctgtgccccctcacacgtacagctcataccttacagagtcccacccagacccagcacccacctcaccacctttaggaagccttgatcccagcacagttgattgatggctcttgcagtggagttccccagctagggtcccctgcccatgtggcccagccctgcctaacacacagcgtcctcctcccctaggcaacagagacatccagatgatcagctgtggggctgacaagagcatctactttcgcagtgcccagcaggtagggtggcatggcctccttgggggctggggtggggggttgtcggggcattctctgaaggtcctgccggccctgccagggttcggatggactacactttgtccgtacccaccacgtagcagagaaaaccaccttgtatgacatggacattgacatcacccagaagtacgtggccgtggcctgccaggaccgcaatgtgaggtaaggggtggccctggacccttagctggcctggtctgccttgtcctaggctgtctgctttcctccctctgttcctctggtccccaagaagctgggaaggaattgagggacccagcaggtgttccttcttggtttttttttgtttttgtttttgaggcagagtcttgctctgttgcccatgctagagtgcagtggcaccattttagctcactgcaacctccacctcctgggttcaagtgattctcctgcctcagcctcccaagtagctggaattacaggcgcctgccaccatgcctagctaattttttgtatttttagtagagacgaggtttcgcc[142 bp omitted]gcctccaggtcagcagagggctttcttctggctctccctagagccggtgtgggatgactaaggtgctgatgtggcacataaactccctcattcacccgtattccctgagcacctaactgggctggatggtgctgggatcatggcagtggccaggatagccccaggccctccttcatggagctcacagtccagtagaatggacacggccacctcacagccacagacagtgacagagtggtcagagatgggggagcccaggggccctgtggagacacctgaccccacctgcggatcaagcaggacttcctggaggaagagacaccttagcctggggaggatgtggaggagcgagccagggggaggcagagagtgagtgtgcagagggcaaagcagtgcaaagaggctctgcaccccttcccagttctttctcatgcggtgccaagcactgagcttgcagtgtgtgggggagatgaacattaactcagtggataccccaggacaacctcagcttgagatggggtttcagtttcagtctaggcatcagatggggacaagaggtagcagggggcttccaggggaggggaggacagcaagagccagagaatgaggtggtggggtaggcggggccctgttggccgcaacatgcccctacttccccagagtctacaacactgtgaacgggaagcagaagaagtgctacaagggctcccagggtgacgaagggtccttgctgaaggtgaggagttggagacccctgtctgtctgctgccctgatgggccacctattgtgacggcccacacctgagacctgtgcccttggtccttcctcagtgcaccgcgctgcccagcaccttctcaggcctggttaaacaaggatgcttgcgagagggtggggagggtgaccccagctgtgtttcctttatttacagagcccttccccaagtggggcgtctaagtgggttccattttgagtggcagcagggtatggtgggaagaatcagaggcatgaactcccctcctggtttgcccacaccagccacgggtcactcaggacaaggggggaccttctcagagcctctggtctaggacagttatgggttcaggttctgcctcaggctgactgtgtgaccttgggcaagcatcatctcttgaaatgcacacagacagcttgtctcatagacttgttctctggaggagttcagtttgcacatgttcagtgcttagcacagggcctggctactgttgttactgctgcggtggttgttaatttcttcacgtgtcgaatgggagcgggagctcctgccctgccagagtcccatgtgctgtgcatgcagcacgggggagggaggggcccaggcctcatcataaggaagaagcaggcagctggagtgacatgtgggtccctttcctggcaggtccatgtggacccctcaggcaccttcctggccaccagctgctctgacaaaagcatctcagtgattgacttttactcgggcgagtgcattgccaagatgtttggccattcaggtgggtgtgcctctctgcttgggatgcctccccacccgcccacaccctctgactccgaaggcaagtgcagcctctctgctttgtttgcagaaattattaccagcatgaagttcacctatgactgtcatcacttgatcacagtatctggagacaggtgggacatggacctttgggagagttgtggctcagataccatgagcactgcactcagcctgcctgtgtagagagcatttctaaactgcccagtttggattgtgggagtcttggtgtcacacccagccctgagttcaaataccagctctaagctgggcatgatggctcacgcctgtaaccccagcactttgggacgctgaggcgggtggatcacttgagctcaggagttcgagaccagcctgggcaacatagcaaaaccctatctctacaaaaaattagccgggtgtggtcatgtacacctctagtcccagctactcaggagggggaagatggcttgaacctggtaggtagaggttgcagggagcacagatcatgccagtgcattccagccttggtgacagagcaagaccccgtctcaaaaaaaaaacaaaacactaaaaaaacatatcccagctctgccatttattttcttgtcaccttgagcaggttatttcccctgagcctcagtttgctcccctgtaaaagacaccaccgtttacatttaccttaaaaatggtgtgatgaggccgggcgcagtggctcacgcctgtgatcccagcactttgggaggcctaggtggatggatcatctgaggtcaggagttcaagaccagcctggtcaacatggagaaactgtgtctctactaaaaatacaaaaattagctgtgcgtggtggcaggcgcctgtagtcccagctacttgggaggctgaggcatgagaatgacctgaacctgggaggtagaagttgcagtgagctgagatcgcgtcactgcaccctagcctgggtgacagagcaagactctctcaaaaaaaaaaaaaaaagaaaattgtatggtgagaaatgaatgagatgatatacatacattctttagcacatgggtggtactcaaggaagtcccttttgtcactccctttgatttaccccagttcttccccacagcccccttcctcaggtcttgaggcctccagaacaggccctggtttgctgggatgccccagacctgggcccagggtgtggatgtggcaagtccagcacccctgcactaagcggataggggtgtgttttccaggagcatctggagaatggggtccaggctgtggtgtgggtggcttcagggtcagccacggcagcggctcccatgcttactcttcctctgccttgtgtgtctctctttgacctccgcagctgcgtgttcatctggcacctgggcccggagatcaccaactgcatgaagcagcacttgctggagattgaccaccggcagcagcagcagcacacaaatgacaagaagcggagtggccaccccaggtcctggcagcccctgcctgtccaccagagggatgagtccctgccagggccccatggagtgatgctggggacacagtggtggccaagacagccctaggccctgcccttagcacactcacagctgagtaggggagacagactttgaatatgcagttacagtaatagatacaaaaaggttttgtggatttttttaattttcgtaaataatagagacagagtcttgctgtgttgcccaggcttgtcttgaactcctgggcccaagtgatcctcccaccttggcctcacaaagtgctgggatcacaggtgtgagccactgcacccggctatgagaagggtattaaagtggaaaagcaaagtgtttggcgagcctctcagcactgtgatgggggatgccccaagcggctgtgggaacagagcagtccctgaccggccagccaaggggaggggtgggtagacaggggatctgaggggagggctgcagtggggccacgtgtcctcttactcccacgtgaaagctgtagcttcacttacttctttgaatcttctaaatatatttctttcaagtctttatgtagcaaagccaattttatttgcagagaactcatgttctggtttttgatttgaggttttggtttgggtattgctcattttgagtgggaggttttttggttttcttctcttctgctgctgggtgtgtctgtttttgccattggctccatgtggctcccagggcaatgtggagaccaggccttgacatgggccactggtcctgaggtcctgaggtggtgttagagatatcttgcttttgaggctcccactccacccccaagctatgaaccagggccctggcttcagtgcctgcctcatgccaagggtgttttagtttcccgtactcgggaagagccaccatcattgctaccacctacaggaagcccagcacaggactgcagccccgctgtctgcttggctttctgtcccattgctgtggccctgagagtttgcattcgtttgtagcctggcctttgttaatctcatctattgtggtgatgtgtttctagtggggagacggcatcaagtgagagacttgccagcaccatcttgaccagcagccaagaatatgttcacatggagcttagcacagggcccagccctaggcaagtccccaccaccagcccatttgcctgtattctctccttaccatcctcattcctggctttaggcaggatacgtatgtgtccacacctagtgagattcactccctgagccctggagagcaaacagaggatgatctggaggaagagtgtgagccagaagagatgctgaagacaccatccaaagatagcttggatccaggttggaaaaggggccctattttgaactatgtcagtgtagggaatcattgctgggttttgcccatgaccttgtttacagggcctggcacatattaaaactcaggagtcgacagggtgcggtggctgatacctgtaatcccagcactttgggaggccgaggtgggtggatcacctgaggtcaggagttggagaccagcctgaccaatatggtgaaaccccgtctcaactaaaaatacaaaaattagccgggcgtggtggcgtgcaactatagtcctagctactagggaggctgagacaggaaaattgcttgaacctgggaggcagaggttgcagtgagctgagatcgcgccactgcactccagcctgggcaacagagcaagactccgtctcaaaaataataataataataataatataaataaaataaataaaattcagtaatcaggcttagcgtggtggctcacacctggaattttagcactttgggaggctgaaatgggagggtcacttgaggccaggaggtcgagaccagcctgggcaacatagcgagagcccatctatgcaaaaaaaaaattttttaaagaaattagccaggcatagtggcacacatctgtagtcccaactacatgggaggctgaggcaggaggatcacttgaggccaggagtttgagaccagcctggcacgtaccaagaccccgttcctacaaaaagaaaaaaattagccaggcctggtggtgcacacctatagtcccagctacctgaaaggctgaggcaggaagatcgcttgagcccaggaattccatgttataatgagctatgattgcaccactgcactccagcctgaataatagagtgagatcctgtctgtagaaaaagaaagaaactcaataatcatatcagtcaagactctttcagtataaaagcaaccaggcttaagtcaggaagaggattttttggtgcctgaaaattggagaggattagctttcagcatggctagatccagatagacagatgatgttaaaaggaagatttttttttgtatcttttggctctgcttttcttcatgttggctttgctgatggacagactgtccctttactaggggaaaagatacccccagcaactacaggcttataaaactccatagagaatagaacacctctttcctatagtagctcaagcagagtcttagggttgtgtggctcatgtttctggtatctgctgtacccacttctgagccagttgttgtagctgtccacatctcagcatgtgatcacttctgagggcagagactgtagtcagctccatccactcacaccacctgaccaggcatcaaagatgtgtttgaggccgggtgtggtagctcacgcctgtaatcccagcactcagggaggccgaggcgggtggatcacctgaggtcaggagttcgagaccagcctggccaacatggtgaaaccccatgtctgctaaaaatacaaaaattagctgggcgtgatggcgtgcgcctgtaatagcagctacttgggaagctgagacaggagaattgcttgaacctgggagacggaggttgcagtgagctgagactgcgccactgcactccagcctgggtgacaaagcaagactccgtctcaaaaaataaatgaacaagtaaaaataaattgaattatgttgcggatattgtccggaatctttttcctctgcaaagtctctcatctacctgtatgttggtgaatacaaagcagacgcctgcgaaattttaagttattcccctccaggtggccatttaggtttttcctgattgcacatcactgttaatgaggctatggagtggagaccactcctaagcctcctcgaaatgtgaggacttctccaggagagagtctgaggagtagcaccactggatcctggagttattttattttactttaaaaaagttgttttattattttatttcactatttttgttgcccaggctggagttcaatagcacaatcatagctcactgtagccttgacctcctgggctcaagcaattttccctccttagcctgtggagtagctgggaccacaggctcaagctcccacacccagctaaatatgtgtgtatcaggggatggtgtgtgtagagacaaggtctcactgtgttgcccaggctggtctcaaacccctggcctgaagtatcctcccacctcgacctctcaaagtggtgggattacaggcttgagccagtatgcctggcctttattttaaaagagaaccccggctgggcgcagtggctcacacctgtaatcccagcactttgggaggccgaggcgagcggatcacgagttcaggagatcgagaccatcctggctaacatggtgaaaccccgtctctactaaaaatacaaaaaaaaaaaattagccgggcatggtggcgggcacctgtagtcccagctacttgggaggctgaggcaggagaatggcatgaacccgggaggtggaggttgcagtgagccgagatcgcgccactgcactccagcctgggcaacagagcgagactccgtctcaaaaaaagaaaaaaaaagagaaccccaagagttctccaaacccagttactgccccaccctgcattgcattaggctctccattgtccccacacttttcctgccatcctttggtagtattaagctttttcacctcggtcagtctcgtgagtcaaatatcgcatcccacggtttaagtttgcatttccctaacccccggtgctgttgagccttctgacttctgggttgtggtgttgcctctttggggactgcccggttatgtatgtggcctgtttgttgggttgtttgtcctcttttcatggattctgtgtctttccagatcctcgttgcctgctaaccaacggcaagctgccactgtgggcaaagcggctggtaagtcttcagggagagggttgctcaggggctggcagaggaaacgcctccccagctctgccttctggaagccctttttcctttccatgtccctcttttccctggagaagccctgtcatccttccaggctcagtgagacagccctttgttcatgatcagtgctctctgccaggcattgttctggatgtcagggacacaacagtgagcaagggaaacaaaagtctctcccttcacaggctcacttgcctgtgtgggcgaggaacaatatccccattaaataagtaaatgacgtagtaggttgggtgctgataagtgctgtggagggaaaagaatcaagaaggaaaatacgtcagccaggtgcagtgatacgtgtctgtggtcccagctactcaggaggctgaagtgggaggatcacttgagcccaggaggttgaggctgtagggaactgagaaggcaccactactacactccagcgtgggcaacagagtgagatcctgtctcaaaaaagagaaaaagaacaggggcccagcacggtggttcatgcctgtgatcccagcactttgggaggccaaggcaggttgatcacttgagcccaggagttcaagaccagcctgagcaatatagtgagaccccatctctacaaaaaataaaaaaattagccaggcatggtggtgcatacctgtagtcccaggtactcaggaggctgaagtgggaggattgtttgggccagggaggtcgaggatgcagggagctgcactccacagcactccagcatgagcaacagagccaacactttgtctcataaaaaaaataaaaataaaaaagaaaataaggagtgttggggggtgtcagttttaagtaaacaggaaaggcctcattgggaaaatgatgtttgagcagagttgaagcaagtgagacaggcagatactgggacgaatgttctagtcataacagcctatacgtgtaaaagccacgaggccaggagctcgagaccagcttaggcaacataatgagactcccatctctacaaaagattaaaaatagccaggcatggtggtgcacacccatagtcccagctactcaggagcctgaggcaggaggatcacttcagcccaggagttggaggctgcagtgatcgtgctactgcactccagcttggatgg[139 bp omitted]tggtaaaaccccgtctctactaaaaatacaaaaattagctgggcatggtggtgcatgcctatagtcccaactactggtaaggctgaggcaggagaatcacttgaacccaggaggcagaggttacagtgaaccgaaatcatgccactgcactccagcctggcgacagagtgagactccctctcaaaaaaaaaaaaaaagaaagacaatgtggattataagagacagaataagagaggtgaatgaaggatgatcccaaggttggggcatgagtaactggaaaaaacaactgaaacagggaatctttaggaggagcaggtttgtgcagaggaaatgagttgagttgtcagcatgttaactttgaaatacctaccagacatccatacagaaatgtagagcagtcacatgtgcaattctgaagtttcagagaaaagttcatgaatcccagctgggcattcccagcactttgggaggccgaaacaggattccttgagcccaagggtttgagaccagcctgagcaacatagtgagagtccacctctaccaaaaaccaacaaaatgggctgggcgcagtggctcatgcctgtaatcccagtactttgggaagccgaggcgggcggatcacttgaggtcagcagtttgagaccagcctggccaacatggcaaaaccccatctctactaaaaatacaaaaattagccaggtgtggtggtgggcacctgtaatcccagctactctggaggctgagacaggagaattgcttgaaactgagaggtggaggttgcagtgagccaaggtcacgccactgcactccagcctgggagacagagcaagacttcgtctcaaaaaaaaaaaaaaaaaaaaaaacagagaaaggttcacgctggagatatgtacctggaagttgtttctgaatggtattgaaagccaagagtccagatgggctgtgtgaaatgtccgtgtcgctccctgcagtgagtgagcactcagccagttgcctgactgtccgatatccttcaagctaggggacgatgatgtggcagatggcttggccttccacgccaagcgcagctaccagccccacggccgctgggcagagcgggccggccaagagcccctcaagaccatcctggatgcccaggacctggattgctactttacccccatgaagcccgagagtctggagaactccattctggattcactggagccacagagcctggccagcctgctgagtgaggtacacacttccaccgcagcctggcccatagccccggcaccgtgacggccccagggcctggcgccttaggctgactcccactccatgggggcagggaggattacatgagatggtgaagggcaggagggtgagccccaggtctgttgcacagcaagacttcccaaggcagacagggagtctttggaaagtgggtcacttgggggttaagagcttggatgctagagcaggcttgtacccaagtgggggacatttgggtagatcgagccctgaccctacccattcctgttgtgtgacctggagtaagaggcttacctctttgggcttcagtcttctaaaaagtagtcataatggggtcaggggcagtggctaacacctgtaatcccagcatttggggaggccaaggcaggaggattacttaacgatcacttgaggagttcaaggccagcctaggcaacgtagcaagatcccacctctacaaaaatattttttaaatttttttgtttgttttgtttttaaatggtaataacaatctcttctgccccagagggcttttacaggaatccatgcttaagtatagggcctgggctcttagaggtgcccgtgcaactttagctctttctctactattttccaaacaaaattcatttttatcctatcctataatttgtcatcttcattgtggtataatatacatccagtaacatgcacagattttaggtatacagcttgatgaactatctgtgtaattcacgtgtgtccactaccctgggcaaaatctggagtgttttctacctcatagaaacccccttctgcccttcccagtcaggtccccgcaccaggataaccagtgttctgacctctcaccaaggactgggtttcctattcttgaacttgatataaatagacacgtagagggttgggcctcctatttttggtgccacacctcttcctcatctgtaaagggactgataatgcaggggcagaccaggacaagctggttgcgagtggagggcatggcacaggccctggttcacagcctccagcagtggggctgctggcatggttcctggcgcactgttggtggccccagccatgcctgcctcagaatggctgtgctgtcttccccatagtcagagagtccccaggaagctggccgcgggcacccctccttcctgccccagcagaaggaatcatctgaggccagtgagctcatcctctactctctggaggcagaagtgacagtcacagggacagacaggtgggtgtcctttccaccaagggagccttagttggaggaacccccagctgatagctgcatcctggaagaagtgctctctgccttcccagtgggcttgtgggagtggggacagttgaggcctggatggggcaggagcccagccttagttccctggttccaggtggggtacaggagggcctgacctgggggaaggagggggcatttggaggaggcggggaggctgtcgcagtgctcctgcaggagcagcgggtacaggtgcctaggggctccgggtggggctagctgttgagtctccagctgaagtccttgttccctctctgcccccactggcactgcagccagtattgcaggaaggaggtggaggccgggcctggagaccagcagggcgactcctacctcagggtgtcctccgacagcccaaaggaccagagcccgcctgagggtgagtgcagggcaggcagggaccctgtgacagtctgtgcgttcagccaagcccctttctgggcaccgatggtgactttgacccagtactgaagctcagagtctgtcgaggaagacacatgtggtccctgctgctgcctgaggattctgggcccagctgcctacagctgagagcccagctctgccacctccttgatgtggaacttcccttattcataaaatggggggcagctgctcttaccatccctcctccagatggggaaactgagcccagggaagggtagccctggccctggctcaccagaatggtcaggctgtgggctcctgaccccgactctgtccttcagactcgggggagtcagaggccgacctggagtgcagcttcgcagccatccactccccagctccgcctcctgaccctgcccctcggtttgccacgtcgctgccccatttcccaggtaagcaggggccagacacgcaggggactcgctgctcgggcctggcttagggccagtcacaatgtctaagcacaggccctgcacttggagcccactgagcctggaagacggggatccctgcttctcagcctgcgggcaacagggcagggatgggtggggcccgctttctccatttcaggtggcgtctgctgtgactcatggtgttggctcctcttgtccctcccctccttccctgtcaggatgcgcaggtcccacagaagatgagctgtccctgcccgagggacccagcgtccccagcagctccctaccccagactccggagcaggagaagttcctccgccaccactttgagacactgactgagtccccctgcagaggtagggccctgcctcacccacacctgccgaggccgtctgtgcagcctgggcacagcattggcgtccctggagttggctccccagcagggccaggagggtgagtggagagcaactgcttcgttttttttgagacggagtctcgctctgttgccaggctggagtgcggtggcccaatcttggctcactgcaacctccgactccctggttcaagcaattctcctgcctcagcctcctgagtagctgggattataggcatccacaaccacgccctgctaattttttgtatttttagtagagatgaggtttcaccat[138 bp omitted]cccactgcccctgctcgtaccctgtgtctgtacataagggtttctggggagtgccccgctgggctgtgggctggcctagggccagggctgctcggcgggaagggttatgagggtcccctcgggatcttcccctagagctcttccccgcagctctgggagacgtggaggcctctgaagctgaagaccacttcttcaacccacgcctgagtatctccacgcagttcctctcaagcctccagaaggcatccaggtagaagctggccaagcactgcccaccctctggctcctcaacagtgccccagggcaggctgaatgagaatcatcccccctgctctcctccccacaggttcacccataccttccctccccgggcaacccagtgccttgtgaagtctccagaggtcaagctcatggaccgaggcggaagccagcccagagcaggtactggctacgcctccccagacaggacccacgtgagtattgggcccacctccgtcagggcacggggctgggaaccctgaggccttgtcctcacctcagagctgtgcctgcaggtcctcgctgcagggaaggctgaagagaccctggaggcctggcgcccaccacgtgagtgccccagtcccagacggacagtcctgggtttctcggcgagtggccggatgtccagcctagctgtggggcgtgggggccctagccatcagttctgtgtggtggagtcagtgccatctgcttccgttacagctccctgccttacgagcctggcgtcctgtgtccctgcttcctccgtgctgcccacagacaggaatctcccaacgcccacatctgcacccaccccaggcctggctcagggtgtccatgccccctccacctgttcctacatggaggccactgccagctcccgtgccaggatatcacgcagcatctccctcggtgacagtgagggccctatcgtggccacactggcccagcccctccgtaggccatcgtccgttggggagctggcctccttgggccaggagcttcaggccatcaccaccgcgacaacacccagtttggacagtgagggccaagagcctgccctgcgttcctggggcaaccacgaggcccgggccaacctgagactgaccctgtcaagtgcctgtgatgggctcctgcagccccccgtggatacccagcctggcgtcaccgtccctgcagtgagcttcccagcccctagccctgtggaagagagcgccctgaggctccacggctctgcctttcgcccaagtctcccagctcctgagtcccctggccttcctgcccaccccagtaacccccagcttccagaggcccggcctggcatccctggcggcactgcctccctcctggagcccacctccggtgagtacagccctggagcaaggactgtcccctaagctcatcctgtgtgctagttggctcagctccaaagatggatacttgacctggccacagggactgtgccattcattcattcgtgcattaacttaaatatttaatgagcattacatgttgggctttgtgctaaaccctgggacatgggacatggtggtaaacaacacagagaactgacagcttcaatggggacaatgcccagactaaacctttaaggaacccgtcatatgtatcacgaagtgacacatgcttaggagggacagaggagggcgagggagtgcagggtggggacaggggttgggattacaaaccagaagataagaagaggcttcagggaggaggctgcattggagcagagacctgtaggagtgaaggggagggagccttggggacccagagaagtgttccagacagaagtacagcatggagtccacccagtcgctctggccgctcacaccaatggaatgcagctcatcttgctcattcccttctctctaccccaggtgcacttggtctgttacagggcagccctgcccgctggagtgagccctgggtgccggttgaagccctgcccccatctccccttgagctgagcagggtggggaacatcttgcacaggctgcagaccaccttccaagaagccctcgacctttaccgtgtggtgagctaagccccagagttgggaaagggttgaggggtctcttgagaccgcccggccttggtggcccctgacaaggctggcatcccttgcagttggtctccagtggccaggtggacaccgggcagcagcaggcacggactgagctggtctccaccttcctgtggatccacagccagctggaggctgaatgcctggtggggactagtgtggccccagcccaggctctgcccagcccaggacccccgtccccaccgacgctgtaccccctggccagcccagacctgcaggccctgctggaacactactcggagctgctggtgcaggccgtgcggaggaaggcacgggggcactgagggcgcagcccctccaccgcagccctgctgcttctgaggacttaggtattttaagcgaataaactgacagctttgaggaatggttcctggtgtctgtttgggcctatccacaaagccctcttcaagtggaagtggggagggagggtagaaggtgatgcccagaggactcgtgtctgtcagtggagagcatgggaccagcgctcccaagaagttcaggaactgcagccatgacctcagggccagtcctcccacactgcccacagagctgccacagaccagtgtgaggtgcttacccagtggggcccatttgtgccccagggaggagccagaccctcttacctgccccctgccagtgcctgagaactcactggggctgctgtgatcaccatgtgcctaccttgcccagcagtccacgctttgccatatcatggctcagggcctctgggccaaggccacactagatcccacaaagtccacggtggtggtgtccccatctgcaacaggggaaactgaggacccatgaacaggcttgcccaagctgggtatggtggcctgcacctataatcccggctactcaggaggctgaggtgggaggatcgcttgaggccaggagtttgagaccagcctgggcaacttggtgaaaccccatctctttatttcatgtatttatttatttatttttgtttttgagatggaatcttgctgtgtcatccaggctagagtgcagtggtgcgatcttggctcactgcaacctccgcctcccgggttcaagcgattctcctgcctcagcctcccgagtagctgggattacaggcacccaccaccatactcagctgatttttgtatttttagtagagacggggttttgccatgttggccaggctggtctcaaactcctgaccttgggagatccgcccacctcggcctcccaaagtgctgggattacaggcatgagccaccgcacctggccaaaaccccgtctctttaaataaaacaaaataaaacaagaaacccaggcaggcttgcccactgtatgatcctggcagcaggcccaggccacgagcagctgggaccaataactgcttccccttcagaagttctacattccacgagctcccagcactgctaccagctcccccagacagcaggcatctggccacatggggtgtctgctaaaaaagccactcttggctggggtgtggtggtgcacacctgtagtcccagctactcaggaggttgaggcaggagaatcgctcaaacccaggaggcagaggtttcagtgagctgagatcacaccatcattgtacttcagcctgggtgacacagcaagtctcaaaaaaaaaaaaaaaaaaaatcctgccagttcccacccaggtgccgggcactgtagcagaaggaacatcaggcaacgcacctgccctcatggccactcaccttctatacagtcaaacagatgcaggaattagagctctgtataattctagataggttggggagatccattgctggtgaagggtcagggaaggcctttcgaggtgacatttgggctgaagcttgatagaggacatctcaggaacacatccaggccgacagcacagccagtgcacaggcctggggcagccacacgtgatctgtgtggaagcaagaggagcgaagcccggacggctggaatggagtgagcaaggggagggcaggagctgaggtgcaaggaggagcagggccttgttgcttcataacatttaagtccaaggaatatccagaacagttttttgtttttgggtttgtttctaaatctctgctcttaatgtttgggggatatccagtgttgcttatttctcacgactctgcctcagggagtccaggtggtccagaacttgaaccacctgcctaggcctaggcccatctgcctagttcggccaccattgcccaaaaccttgcccaacatccctgggcaaagcttggtgttcagccccccaggcctcggacacccaggagaccaccttgggcctctgtcatgcatggaattacccttccttccaacctgtatcatagtaaagtcttctgctccaaggagtaaacacctggctttcagggcccaagatggagggacgttggttacccttgatgtcatcatgcacctggcctcttcctctcctgctctgttatcctctgtgagcaagcttcagtctccagcttatggcctcatggttgcaacacggctgctgtggcacccagcagcacaccctcaggtggtgtctccattttgcaattgttggctttcctgcagccctgactgaagtgcctggcataagcctggaagcgcaggagctagaagctgccccgatagtactgctatggggaggctgaggttagatgtggagtgcagggggctcacagagggtgacagcaggagaggaagaggccaggtgcacaatgacatgagggtcagaggcccaagttattggtcccagctgctgggtggcctggtccaaccaggagcaaaggcacagagcagggcaccctctagggcagcagaaaagatgcagatctctcccaggggtctccctgggagactcatctggggtcagatgagtcccaggcaacaggaatggagattgctttgatgtgcttggaccatctctcctgtcctgggcatgttgcagctcaaacaaagaggttctctcaataagaaaggcaagtgggctggtaatcagagaggatccagcatgtctgccacttccctcttccaaatgccaggctctgtcctggaaggaccatactttctccatacttcttaaccaggataaaccacctggttaagaagccactgctggtggtgcagcatgtgtgcatgtggtttgtgagctgacagggtcccagcagaaagatgacagcatgcttagatgggatattccaaagagtttaaccaagggatcatttgcaaaggagcagcagggactgggaaaccaccgaggctggtgcagaaccccaggactggcaccctgggagctgttaccacccccaggccacaaggcacaaagagaaggaacaagaacccaaaagagcaaatcccagggagagggtagtgctgagggagctgcagccctgactcccacacaggacggagtgagaatcaacaccctgaccttactcccctcctgcagggcaccccattgtccaaatcctactggaagccagagtgcatagaagcccaggtgaccccgcctccagtcaacctcctaggccatggagcagggcagaacaggactgagagggttcctggggaactgggtccctggaaggaaaacagttcatctttcactgcaactccccccctgcttctacccccacatctacccttggcctccccatagcagtaccatcaggacagctcctgggtcctgagctgccaggcccgtgccaggcatcccagtcagggctgcaggaaagccaacaattgcaaaatggagacaccacctgaaaccccattttgcagatgacccacctgaggcctggatgtttgcccagaggagggattcctcggcaggatgcagtggctcattcctgtaatcccaacactttgggaggccaaggcaggcagacggtttgagctcaggagttcaaaaccagccctaggcaacatagcaagactccacctctacaaaaaattttaaaattagctaggtgtggtggtgcacgcctgtagtcccagctacttgggaggttgatgtgggaggatcacttgagcccaggagcttgaggctacagtgagctgtgttcactccactgcactccagcctaggtgacaaagcaaggccctgtctcaaaaaaaaaaaaaaaaaaaaaccttcctaaccaatccctgcttatatgtctgccacatgccaggccccatgctaagcattctctccatgtgagctacatggatcttcaatacaaactgggaagagggagattccttagtctcattttccaggtgaagaaaccgaggcccaatgagaaatgacttgctctgggtcctgcagagagcaagcggaaatgcatggccagcagaccctcagcactgccacccttgcttccccaaatgaattggcacaactgactctcgggcaatgtaaagaaatgaagaaatactcctctcaccagcaagccttgtacagatgtccccctctgactagaacaccctcccctttcatctgaaacctttcagcgcttatccaggaagccatccctgtacccgtagcctggatcaggagcctgttcgggtccccaggtacccctcttttccccatcatggctgggtctctgcctcacttgcctctcactgtcttggtcattctgggctgtcactggtgtgcctccttcatggacttacgcgatcattt[134 bp omitted]acatggtgaaaccctatctctactaaaaatacaaaaattagccgggtgtggtggtgcgcacctgtagtcccagctacttgggggactgaggcagcagaatcgcttgaacccaggagacggaggctgcagtgtgtggagatcgtaccactgcactccagcctgggcaacagagtgagaatct[144 bp omitted]gtgaaaccccatctctacaaaaaacacaaaaaatcagctgggtgcagtggtgtgcccctgtaatcccagctacttggaaggctgaggcaggagactcacttgaacccaggaggcggaggtcatagaggagccaagatcacgccattgcactccagcctgggcaacgagcaaaactccgcctcaaaaaaaaaaaattaaaaaacagagcttggattgcttcttagtcttctggctaagaatcaagtgtaaaacagcttggccagtgtgccggggtagggtcctgggagcccctggctgtgtcaagagaccccctttgggccaggtgcggtggctcatgcctgtaatcccagcactttgggaggccaaggcaggcggatcacttgacgtcaggagttcaagactagcctggccaacatggtgaaactctgtctctaccaaaaatacaaaaattagcccggtgtggtggtgcatgcctgtagtcccagctactcaggaggctgaggcaggagaatcgtttgaacccgggaggtggaggttccagtgagccaagatggtgccactgcactccagcctgggcaacaagagtgaaactccgtctcaaaaaaagaaaaaaaaataggagacccccttttactttccagactgtgggagggaggaagagtgttgtcccaggcagtaactaggggctagattattaacaaactagtattttagtgcctgctacacctgaacagtgcttctggctgaatgttagccctgggaatctgaagatcagagaggtggggcatcctacctgaggatgcacagcctggatcctcattttgccctgatttatccagatctgctgtcctccctgcaccctacagagcagggcaatcacagcagggggccccttcagtgtcctcagacagctgctgtgatttgaataaccaggcaggctgctggatgtcccctggtgactgatttgcctggcaaacagaccctcaacccctgggagacagtccccctggggccttgtttcttcttcctatcctcaaaagctccccaggcccatctccccttgcctggctctgcttggtggtcctagtgcttgtccacccctggaggctggatggttccctccaaaacctgggagaagatgggcaggtccccaggcaggggtaacctgagccagcttagtccactcccagggccagccaggaaatttgcatgaagagaatgaggttcctcagaggcttcccctcctttcccaccagggatagtcatcctggggctgaggtctgacagcaggtggaagcagcccctgtgtgtggagagccttccggagggcatgccccgcgccttcctggtcaggagtcggcgtccacagccccccaactggggccatctgcctgaccagctccggggagatgcctatatcccaggtgggcccctcactgtgcctggaggtaaggggcaggagagacgcagtgtcaccatctggcttttctcctcagactgcagcagcctgggggggccaccggcacaacagtcgtccagtgtcagggatccgtggacagcggtgagtgtgtaactggctagcaaagccagctgtttcgctcctgcctgctctcagccttaatgaagctgacagccccttgctcccccgacccatctgcacacgccctccagcctcgggacctgtccgcccctacttctctgtgttgggaatgcctctcctttcctagtagtgagctctctactgttaggtctcaccccaggcaccagggccggcagccacagggatctcttccagcggggcacaagattcatccccacatgtggatgatccgctttatgtcagaacatgggacaaggcaacaggagtgcgatgggagataagggctttttcagctgtgcatgcattggaggaaggaaagcgccagccggaatgtaatatattcatgaaagcaaggcactgttctaggcatgggctgttatattcagcgggaataagacaaaaatccacaattttatggagcttatattctggttggggctgcatgtatagacaataaaattagtcagcctgtaattccagcactttgggaggccgaggcgggtgaatcacttgaggtcatgagttcgagaccaggctggccaacatgttgaaaccttgtctctactaaaattacaaacattagccagacatggtggcacgtgcctgtaatcccagctcctcaggaggctgaggcaggagaatcagttgaacctaggaggcagggcagaggatgcagtgagccgagtctgcgccactgcactccagcctgggaaacagatctagactccatcccccctcaaaaaaaacaataaaattagaaaaatagaccgggcatagtggctcatgcctgtaatcccagcactttgtgaggccaaggtgggtggattgcttgaggtcaggaattcaagaccagcctggccaacatggtgaaaccccatctctacaaaaaataaaaaaattaactgggcatgtggcgcatgcctacaatcgtgtaatcgtggggaggctgaggcactagaatcgcttgaacccgggaggcggaggttgcagtgacctgacatcataccacttcactcctgcctgggcgacagagcaagactctgtctttaaaaaaaaaaaatgtgtatgtcacatcagaagatgggacttggcatagagaaagtaaggaccatgggatagtgagggaaggccctggagagtgacaggcacacacactaatcactgtctcccacctgccttcctaatcctccgtggtggctcaggacactctgtaaatactcatttgcagagtaacaaagggtggatggggtccagccagagaggctaataactcctgcatccctccagcagcccacacagggcaacctgacctctgctcccaggggccctgggacgctgggctgcccgctctgccctaaggccttccctctgcagcgcatgctgacaaggcacctcaagtgccacagccccgtgcgccgccacctgtgccgctgttgtggcaagggctttcatgacgccttcgatctcaagcgccacatgaggactcacactggtgagcagtggcagggacagggaaaagttgctgggccccaggtggggatggaaggaaatggagagaggtgctgggctgtggagtgtccatggtttgtgtatgtggggtatggagaatcaagacatgatgtctctcggaccccagtgggtgggtgtaaggtggcaccaaaataggggcctgtcacggaatgcagagtgcagacggatgccggttatacgattcaggctccagatcgaaaggcaagggaaggcctccctctccatcccccaggggagggagcatcctggtgagggagagtggagacacaggtgtctggcccatgtctgcactgggtgacggtagcagatggtgggtcatgggcggaagagtctgaagagcttggaataggtaccagaaatgctcaacactggaaagcagggtgggggcgctttagtccagagcccattgccctctctgtccagccctcccctctgcgcccatctgtgcagggatccggcccttccgctgcagtgcttgcgggaaagcgtttacgcagcgctgctccctggaagctcaccttgctaaggtgcatggacagccggccagctacgcttaccgtgagcgccgcgagaagctgcacgtgtgcgaggactgcggcttcaccagctcccggcccgacacctacgcacagcaccgcgccctgcaccgcgcagcctgatacggtgtgccagcgtcctccccacgaggcaaataaacacagaaaactcacgcatggaatctggtgtttattacactcgggggagagaggaggtcactcggtccagcggtggccgcagtgtggggctgtgcacacgtagtaaaggcgcatggcgtcctggcagaaatgatgcatggttaggaaggatttggacccagcagcgccttaccccaaaagaacaggcaagagaacttcaccaataggtaagggcccggcagagttccaagaagcgcagggtcacccacattgatatccccgcccccagaaaggaccaaacaagccccagatacttagaaagccctcgcgccacttacctcggcccgcgcactgtgtgactggaagaacacagcctccttgtggccgcacctgagagggtaggggctcggtcaccggaggcttcacacccttccctcctcccttcgcccagtgaggagacgagcctcactttacctccccagtaccagctgaacgctcacttttggcacgggtggtcctcggtccgcggcaacgtggggtcctgggacacgtcggcgataatctgggtcagttcgctgcagggacgcgggggtgcaaaattacgctcagacccagcctccagagccaacacccccgcccccagctcagggcccgccactcactccacttcgtgcgtgatcttgttgacatagatgcagctgttgtcggcctcctgctggtaatcacagttccggcactacgagagggcgagtgtgggggaaagggggtcacggaaggattccagacaagattgggaggagagggcagggtgatcccggaggatatgacgacaggactctctttggggatgggcaggacatgagagtcaggatcacttgaggtgcagcggagggcgaacagggagtccgatcacagaggcagggggcagggcggggccacgctgggaacaggtggacctgccggggaagaccccggcgctcaccgcgtagagcagaatgcggttctccttgtcttccttggggtacagcatgttgttactgtggggagggggaggtgccaggggttagttctggagccattcctcgcccgccttctaacatcacccgctccctccgcctcaccattcctggcagaagcgaatacccacgaagcccggctcgtaagtcccgtcgggctccatggcgacgcgcagcccgcgcagccctcccagccttccgcgcttgctccgccgcgctacaggtcgcgggaggggccaggcctaggtgcttcgccaaaagagggcggagctgcgcacacgtgctggctccccgccgcctcgggctcggctctctccgcgcagaggtttcatggcttgcttcaatcttttgatatcttagagtaattgcttccaatttttgggcatcgccgcctcagtttacagaatagtatggatctggtgccagagccgggaaaacgatgcgcatcgtaaaccgcaaaacactgagcatccaggacagaagccaaggcgcttggcttggttgaaggccagtgcgcatgcgcgagtttacccttcgcggactgggcgagctcttgccactcctacctccgggcttcagtcttcgccgcctgttctggtcctttcccgggccgctattggaagaaccgtgaactatggaaggcccctctggattggctgggctggcccaagagtaaggagagccctcttcctggcggtggggaagggacggcggcgattggcggacgctcctggcaggagagcgcggattggtcaggcacggagcaggaggcggggctgatagcccagcagcagcagcggcggcggcggctgcggagcgggtgtgaggcggctggaccgcgctgcaggcatccgcagggcgcggcaagatggaggtgacgggggtgtcggcacccacggtgaccgttttcatcagcagctccctcaacaccttccgctccgagaagcgatacagccgcagcctcaccatcgctgagttcaaggtgtggccatgggggcggggtccggaggggcggggcgaagaaattggggggttcccggaagggggaggctgggaggggccggggagtgactgggcgggcccggaggtgatcccaggctgcggaggctggggacccggtcgcggcggggcgggtccggagagaactcgagagtgcagagatgagggccgggtccagcgaaaaatccgacggtccagagggcgggggcaagaggcgaggggctggattgcggccccgtgcgtcctgactggggggtcttttggaggaaaagggacgtggcgatggtcattgatgcaaggggcggggcctccgtggcctccttcttctcaccctgcctcctcctcacagtgtaaactggagttgctggtgggcagccctgcttcctgcatggaactggagctgtatggagttgacgacaagttctacagcaagctggatcaagaggatgcgctcctgggctcctaccctgtagatgacggctgccgcatccacgtgaggactctctatctgggacactcccccaccccacctttcatttggttattcaacagacacttgctgggctttgccctcagtcatacccgagataggtcctgccttcgtggagcctccagtgcagcctgacgagagacagacccatcattagacagggacagcctagagtggtctgggctgggatcaggaaatcccaggggactggagccaccaagaagaggtgcctgactccacctgggagaatcagagagggcttcctggaggaagggatgtctgagctgagggatgaggaaagggtgacttaagagaaagaggtggaaaggagggagcagggtgtacagaggcctagaatgtgaggtaggtcacagtgagcgaccaggctggacagcttgggagaaaccagaacacaggatctctttgtgcatccactcagtacatcctttctgtctttttttgagacagagtctcactctgtcacccaacctggaatggagtgcagtggcactatcgggctcactgcagccttcacctcctgggttcaagtgatccttgtgccccagcctcccgagtagctgggattacaggtgcccacccagctaatttttgtatttttagtagagatgggtttttgccatgttggccaggctggtctggaactcctgacctcaagtgatcagctcaccttggcctactaaagtgctgggattacaggcgtgagccaccaagcccagcccctttctgtccttattccctcccgacctcactcagtctgtagcagccacattgctccttgcacagtccaggtgagctcggcctctggatcctgggcctgaatggttcttttgtcatatgcctgcgtgcctcacccttccttcctgtcttaatttaaagtgtcagtattctagtgaagtcttcaccggcctcagtgttaacgtttacctcattcctttccccttctttgctttattttagatttttgtgtttacaagtaattctcctctgacacactctggatttctctcatctggtttatttactctctgtctccctggattcgagtgccctgagggtggaaattttgatcactataattcactactgtgtccccagtacttggaatagtgcctgggacagggaggatagtccgtgaatcgttttttgttttgttttgttcgagacagagttttgcccttgttccccaggccggaatgcagtggtgtgatctcagctcactgcaacctctgtctcctgggttcaagctattctcctgcctcagcctcccaagtagctgggattacaggtgtgcaccaccacgcctggctaattttgtaattttgtattttaagtagagttggggtttcaccatgttggccaggctggtcttgaactcctgacctcaagtgatctgcccacctcagcctcgcaaagtgctgggattacaggcatgagccaccacgcccagccctgtgaatcattgttgaatgatgaattgaatccataaagtaagaccacaaggataatgtaattatccccattttgcagaagagaaaatttagcttcagggtggagtttatttatttattttttattttttttgagacagagtcttgctctgtctcccaggctggcgtgcagtggcatgatctcggctcactgcaacctccgcctccccggttcaagcgattctcctgcctcagcctcccgagtaggtgggattacagatgcccgccactacaccagggtaatttttgtatttttagtagagacggggtttcaccatgttagtcagactggtctcgaactcctgacctcaggtaatccgcccacctcggcctcccaaagtgctgggattacaggcatgagccaccgcacccggcccagaatctactttcttaaggatgaactgtcagtagcattttggccccagtctacatgactctagagagaactgcttcttttttctctcgttgattaactgttcattccccatctgtgttgtgccaggggtttcattatgactgcatctgagaagttctagtgtatgaggcagatgttggctaaatggccagaggactgaatgtgaagggtcaggggagacaagggttgtgtaggagatcatgaagctgggagaccctatcctggggtacctgatgcatcagtgacgtctgggaggacatcctggaggtggtgctgctggagcagagacgagaagaataaaaagaattggtcgggcatggtggttcacgcctgtaatcccagtgccttgggaggctgaggtggacagatcacttaaggtcaggagttcgagacggtgaaaccccgtctctcctaaaaatacagaaattagctgggcgtggtggcagatgcctgtaatcctagctactcaggaggctgaggcaggaggatcacttgaacccaggagctggaagttgcagtgagctgagatcacaccactgcactccagtttggatgatagagtgagatcctatctttaaaaaaaaaaaaaaaaaaaaggttaactgaagatggggaaggggtgccctaggagtggggcacaacccagcaaacactccaaggtgggagggagcgcggtggggattaagacaggccacttctgtggccaaacactgtggaagctggggaggaccctgacctggctcaggtgttcacaggccccctctggctgtgtgtggggaacaggtggtggaggacaggaagagtagggagaccaggaaggggctgctgtgagagtcctgatgaggggacgaggtctggagctgtgggtcaggcctctgctgggtgcacaggactgagcctttgggccaccctgggcagctgaagctaaggggtgcgggtgttcataggcacctcataggcagtggcatctttgagcaggtttcataacaggcggttcaggtacacacagacctcccaggccactcaaggaaggtgttccagagtggagccactggggaatttttacattttctaaaattctttttctctttataaatatcacccatattcattgtttaaaataacagaacttcaaatttgtgaaaattctcaacagaaattctcagtgacgcttcatccggaggtaaaggccattcctattttgccatgttagcccagtggcttaggccagacacctcagggtgttccttgggcccgctctctccctcacccccacatccactctcatcaaatcctctcggctccacctacaaaaacttccctgaccctggtccagcctccatccttcccccaacctcgccatcccggcagcttcctccctggcctccccgctccccatctcagccagagggagcctgggaccacctgagtcaggccagggccctcctagctcagagccctgccctggtggcacttcgctccagataaaaaccaaagtctaggccaggtgcggtggatcgtgcctgtaatcccacccagtacattgggaggctgaggtgggaagatcacttgaggtcaggagttctagaccagcctgaccagcatggcaaaatgtcgtctctacttaaaaatacaaaaattagccgggtgtggtggtgtgtgcctatagtttcagctgcccgggaggctgaggcaggagaatcacttgaatttgcagtgaggcagaggtttccgtgagctgagatcacaccaccacactccagcctgggtgacagagcgagactccgtcaaaaaaaaaaaaaaaacccaaagtctccagcagtcccttgtgtcttccactctccctctggctcgctccaccccacccgcaccacccactctagagcgtgaaggacatttctacctctggccgtctgcacctgccgttcttgctcatctttccagccttggctgaaacatcccctcttttgggaagcctaccctcccatgctccttaagcctcttccctgtcatatttttctccatagccatcctccagtgtttcataggtacctgttcctttgtttgtggttggccttctccctgcacaatgagcacagcctgagggcagagtgcgtctgtgtttacactgagtccccagcatgaggcccagctgggcccctgggagctcggaaaccaatgaatgaatgaatagtgggggcagaacaggaagagatgctctggggcctgaggttggggccagcttaggagagtcccagaggcccatcgaggagatgcgctgtgcacagggctgtgggcaaggcctgagctctgccggttggactctgtgactttggggcccttggcgatgttgatgccagcaagcggggaacttctggggacagaggcagcctctgggagcttggatgggggtgaggaaggggaggtggccagtgtacgtagctacttctcccttccgctgggctcaggagagaagagaaggctgcagtacaggcgagggagggagatgcgtttttcccagatggagacactgaagtccctgcacccagcacccaggcctccctggccagaccctgatccccacggagcccctcccctcacacaggtcattgaccacagtggcgcccgccttggtgagtatgaggacgtgtcccgggtggagaagtacacgatctcacaagaagcctacgaccagaggcaaggtacgggcaggtgggcgtcgaggggtgcgtgggggccagagggagtatgtgcaggtatgagggcgggcaggttagacagggcccctgcagggaggccagtggtgtagacggggggccgagagcttgggaggatataggggtgaggctgggagtggggacagacggaggcctggggtgggaatgagggccgggaggtgtcaggggtatgggcagtcagacgtggtcgggggagggctgggaaagtggagggagttgaggggtaggtgtgggggctgggtgttgtcagggtcagatgggggcatggggcggtcggacggggtgtggagggcaggacaggtggaatgcgagtggacagggtggcggtcagtgagggcgcctgggacggatcgagtgttgggggagaccgggggcctcagggccggaggagggcggaggaggaaggcggatgatgaaggcagatgtgcgctgaaggggtgagagaccatgggtcctgtagtgaggggtgcaggcggcaccccttccatttacgattgtggagttggggggcctaggagtcctgggagaggctaaggctgtggtgggagacctggggcttgggtgacagccctttgtcacctggaagagagagttcctccgtgaacgtgggcccctcgtgggtggagcgtcatcctgttaggcccggccgacaccccaactgaccccagccccctctgcccacagacacggtccgctctttcctgaagcgcagcaagctcggccggtacaacgaggaggagcgggctcagcaggaggccgaggccgcccagcgcctggccgaggagaaggcccaggccagctccatccccgtgggcagccgctgtgaggtgcgggcggcgggacaatcccctcgccggggcaccgtcatgtatgtaggtgcgtggctcgcgggcccggtcccgggctccagggctccaaggccgggaggaaatgttgggggcacagtggagcctcggagaccacgctctgcctaggggcgcggggttgggggggactcgaaacgatctcagtccctggaggtgacggaaccatctgccgacactgacggcccagagtgtttgtggagggaagtgggaggcgcaggcggagtgatctgtccagcgagggaggaagcagaagccagaggcacgcggcctgtgcgcttcgaagcgtggggcagtgtcagtcgcggtggggaaacgggcggcgtgaccaaggcaggagtgagggaacacagggggctgtgtgagcccagaggaagcacctggaggctgggagcatctgaaggaaaggaggcagcagccaggtgaaaagggaggaagagttcccgccagaaggagtagcgggtgcaggtgagcagagcgcaggaggtccacctggggaaggggagcgggaggagaggggagaagtgtagtcaggggcatgggcagggcggcgtcacagtggagagcagtgtggatttttttaaaaagaacaggctaggcatgatggctcacgcctgtaaactcagcactttgggagaacaaggtgggaggcttgcttgagccccggagttggaggttacagtgagctatgattgtgtcattgcaccctagcctgggc[132 bp omitted]gagaccctgtctctacaaaaaaaaaaaaaaaaaaatcccacaaaacttttgtcagttgtggtggtgagcacctataggtgccccagctacttgggaggctgaggtgggaggatggcttgagcccgggagttgaggctgcagtgagctatgatcgcaccactgcactgcagcctgggtgacagagggagaccctgtctccaaaaaaaaaaaaaaaaaaagatacacggggtacatatatgtattgttacatgggtgtgttgcctgctagtgggtggggaccgggcttctagtgtacccatgacccaaattgtgaacatcgtacccaacagataatttttcaaccctcaccaccctcctgtttctggcatccccactgtctggtatttccgtctttatgcctgtgtgtacccatcccccagtcgtcttcagccactaatttacgtctgtctctaatttgccgattctggatgtttcataggaataggatcatgcagtctgtggccttttgtaactggcgccttccactgagcagaatgctttcaagtttcatccgtggcatgcctgtgtcagtgccacactgttgccaaatagtcctgcattgagcgcctagaccacagtgtatccagtcaccagttagtggacattagggtcatttccactttttggctattatgaataatgctgctatgaaccttcttcttttttttttttttttttttctaatttgagacagcatctggctattgcccaggctggaatgcagtggcacaatctcggccatttcagccttaacctcttgggctcaagccatcctcccacctcggcctcctgagtagctgggaatacaggtactcatcaccacccccggctaaagttttgtggttttttttgtaggatgggatttcgccatgtggcccaggctggtctcaaactcttcccgctcaagtgatcgtcctgcttcagcctcccaaagtgctgggattacaggtgtgagccaccatgctaggcctgaacattcttttataaatttctgtgtggctgggcatggtggctcatgcctgtaattccagcactttgggaggccaaggtgggcagatcacctgagatcaggaattttgagaccagcctggccaacatggtgaaaccccatctctactaaaaattcaaaaattaactgggcgtggtggcgggtgcctgtgatcgcagctacccggaaggctgaggcaggagaatcgcttgagcctgggaggcggaggttgcagtgagccaagatcacaccactgcactccagcctgggcaaccatgcaagactccatctcaaaaaataaaaaatacatttttatgtggacatttgttttcatttctctgtgcctaggagtggaatccctgggccacatggtaacactgtgcttgacttttttgaggacctgccacactgcttcccacagccgctgcagcagttttcattcccgccagcagtgcagaagggtcccattttgtcctcatcctcaccagcactttagtctgtcttttgcttacagtcatccactgggtgtgaagtggaacatcatcatggttttgatttgcacttctttggcagctaatgatgttgagcatctttgcatggccatttgtgtatcttctttggagaaatgtctattcagatcctttgccttttgttttttgacacacagtctcactccgtcacccaggctggagtgcagtggtgctctcagctcactgcatcctctgcctcccgggttcaagcaattctcatgcctcagcctcccgagtagctgggattataggtgagcgctacaacacctggctaatttctgtatttttagtagagacagggttttgccatgttggccaggctggtctcaaactcctggcctcaagtgatccacctgagctggtggatctcccaaagtgctaggattacaaacatgagccactgcgcccatcggtatgtcggggtttggttttgttttttttcttttgagacgtaatctcgctttgtgcccaggctggaatacagtggcatgatctcagctcgctcgttccaacctccgcctcccgggttcaaacggttctcctgcctcagcctcccgagtagctggaactacaggcgcccgccaccacacccggctaattttttgtatttttagtagagacggggcttcaccgtgttagc[132 bp omitted]catgatcgtggctcactgcagcctcaacttcctgttgcccactttgtaatgggattttttttttgcaaagtgggtgttctttgagttccttgtatattcttctgctcagtttttcattgggatgctgtcttttgtcgctgagttgtgtattagtttgctaacaaagtaccactcactgagcaacttaaagttatttctcacagtaatggaggctagaagttcaagatcaagctgtcagcaggttggatttattctgaagcctctctctctggcaaggcagtagtgccatcccccttaggtttttacaaagccctcactggctggtgtcttcacccagtgaatgggggacaggggtggaagcagggacaccagtgaagtggctaccatattagtcccggcaggagctggaggtggtcctagtggtagcaatagaggtagcaagaaatggttttcaccaagacaggcttctactcaatgggtaggcatggatccagggtgatcctgaaatttcatggggatttcttctatgtccagaagcttcacagggatttctcttctgttggcaggtctcacagatttcaagcctggctactggattggtgtccgctatgatgagccactggggaaaaatgatggcaggtaacaagaattcccactcaggtgtctgtgtgtgcatttgtgtgtaagtccatgcgtgctgcttgctgagctgcccatgccagcttctagagtggagccatgtgagggtcctctgaccacacccacccctatcctttcctgcagtgtgaatgggaaacgctacttcgaatgccaggccaagtatggcgcctttgtcaagccagcagtcgtgacggtgggggacttcccggaggaggactacgggttggacgagatatgacacctaaggaattcccctgcttcagctcctagctcagccactgactgcccctcctgtgtgtgcccatggcccttttctcctgaccccattttaattttattcattttttcctttgccattgatttttgagactcatgcattaaattcactagaaacccagaaagtatttagaggacttcatgatttggggacccactgggtaaatagtggcccttcggtatcaggggccagcctctgtctcctcatatcttgctgttcccccatcttctcatcattcccacctcatctgctgtagctaccaggaagaaagggaagggaagggaggggatatcctttgcctttaaaaatgatgtacagccagctgggcacggtggctcacgcctgtaatcccacactttgggaggccagggcgggtggatcacgaggtcaggagatcgagaccatcctggctaacacggtgaaaccctttctctactaaaaatacaaaaaaattagccgggcatggtggtgggtgctgtagtcccagctgctggggaggctgaggcaggagaatggcgagaacctgggaggcggagcttgcagtgagccaagatcatgccactgcactccagcctgggcgacagagcgagactgtctcaaaaaaaaagatgtacaactctggctggatgtggtggctcacacctataatcccagcactttgggaggccgaggcaggcggatcatgaggtcaggagatcgagaccatcctggctaacatggtgaaaccccatctctacaaaaaataaaaataaaaaaattagccaagcatggtggcgggcgcctgtagtcccagctactcaggaggctgaggcaggagaatggcgtgaacccgggaggcagagcttgcagtgagctgagatcacgccactgtactccagcctgggcaacagagcgagactccgtctcaaaaaaaaaaaaaaaaaaaaaaaaaaaagatgtacaactcagccaggcacagtggctcatgcctgtaatcccagcactttgggaggccgagctggcaggtcgcttaagcccaggagtttgagatcagcctggacaacatggtaaaacttcatctctacaaaaatgcaaaaaatgagtcaggtatggtggcgcatgcctgtagccccagctacttgggaggctgaggtgggagaatcacttaagcccagaaggtcaaggctacagcgagttatggcaccactgcattccagcctggatgacagagcaagaccctgtctcaaaaccaaaaaaaaagaaaagaggccaagcacggtggcccacgcctgtaatcccagcattttgggaggccgaggcgggagatcgagatcatcctggccaacatggtgaaaccctgactctactaaaaatacaaaaattagctgggtgtggtggcgcgtgcctgtaatcccagctactcaggaggctgaggcaggagaatggcttgaacccaggaggtggagattgcagtgagctgagatcgtgccacttcactccagcctggggacaagagtgagactccgtctcaaaaaaaagaaaaaaagccaggcatggtggcttatgcccataatcccagcactccgggaggccgaggagggcagaccacttgagttcaggagttcaagaccagcctgggcaacatggcaaaaaccctgtctctacaaaaaatacaacaacaacaaaaattagccgggtgtggtggcacgcacctgtagtcccagctacttggaaggctaggtggtaggatcacttgagccttgggaggtagaagctgcagtgagctgtgttcacaccactgcactccagcctgggtgacacagcgagactccatgccgtgacaccagcacgtggcgtgtcacattattaaggattatacagccaacagttactgggctggtttcctttaatcctcacagcaggccctgtccgcaagtctttcaccgtttcccgtcaacactccacctttcctgcccaaagtttggggttgggagggaattcccaggggttcccaggacttgggctcgcctcccagatcccgcaacctttgcgtgcctagcctcggcaatgaccgcccatctgccacgagggggcggcagcgcaccgttcagacgctgcgcccctggtgcattatgggtcgcgtagtctcaaaggtggcataagcatcctggaacgcaaacggcatttcccagaaaactacgcgacaatctgagcctggtcttgcccagagctggaagctgaggtctcgcccctgccggcgttgcgggggattgtgggatgtaggcatttggctccgcgctccgcgaagggcggtgcagcgcaggcgcgggcatccggtacagacagccgagcttaatctgaggcggggaaccagcgtcccgggggaggcgccgaagctgactttctggccgcagtggaagtgaggcgagcgagctcccttagtggctggagccggctgggcctccttcctgtcctcctgctttcctgcatctctacttgtccctttccccgggctcctggtccgctcccaagcctgttcaagcacgaggcgtttccatctaaaaaaagaaaagaaatctcttttgccgggcgagatgtcagagccccgggagcgaaagtgttggtaatgttagacagaatgagttcctcttcaaaaatctaacttccttgtcctttgctctatgaactgtccttcctgcagaaactgcccttaccggggaaactgcccctccccgccgctgcaacccataccccgcctctattagaaataggcaatcggaatcagcttagattgtgaggtccaaccctagccaacgggggttaaaaacccctgctctcctttattaggtgtgcttttggtacaggtctgggcagcacgcttctgcagaagtaaactttgccttgctaagaaacttttctccgagtgctggtctctctctgtggcaccaagaacttatttctaacagtaagaagaatttactgaggac[132 bp omitted]tacagtgaaaccccatctctactaaaatacaaaaaactaactgggcatgccagcatgtgcctgtagtcccagctacttgggaggctgaggcaggagaattgcttgaacccaggaggtggaggttgcagtgagctgacatcatgccactgcattccagcttgggtgacagaatgagactccatctcaaaaaaaaaaaaaaaaaaaaaaaatgaaggaaagaatgctgcaggccaggcagggtggctcacacctgtaatcccagcactttgggaggccgaggcaggcgaatcacctgaggttgggagttcaagaccagcctgaccaacatggagaaactactaaaaatacaaaattaggcgggcatggtggcccatacctataatcccagctacttgggaggctgagataggagaatcgcttgaacccaggaggcggaggttgtggcaagccaagatcacaccattgcactccagcctgggcaacaaaagcgaaactccatttcaaaaaaaaagagctgatttttttgtttgttttttagacagcgtcttgctctgttatccagcctgtgtgtgatcccggcggtgtgatctgagctcactgtagcctcaacttcccgggctcaagtgctcctcccacctcagtaggccccatgaatagctgagactacaggcacatgccaccacacccagctaatttctgtattatttgtagaggtggggtttcgccatgttgctcaggctggagtgcagtggcacaatctcggctcactgcagcctcaggctcctgggctcaagcaatcctcccacctcagtctcccaaagtgctgggattccaggtgtgagccactgcgcacggccaagaataaagattttaataaagtaatgtgaaattaacatgaaaagccaataaggaaactgggcaaatatttgaaaagacaatacataaaagaaacaccaatagccaaaaaaccatgaaagccaagttcacccccattcatatttgaagaatgttacataaaatattgagacaccaccttttgcctgtcaaatcaggaaagatgtttatttttattttttatttttgagacagggtctctctgtcatccaggctggagtatggggcacaatttcgtctcattgcaacctcaaactcctgggctccagcgatcctcccaccccagcctcccaagtagctaggagcacgggcacaccactatgcctggctaattttttcaaaacacttttttgtagagatggagtcttgctatgttgcccaaactggtctcaaactcctgagctcaagtgattctcccacttcagcctcccaaagtgctgggattataggcataagccgccatgccacaaaattttacaagaaaatttcagccagcatttgacaagattccaggggacatgaatgaaatacctaaagataaaagagttccttgaggccagttaaggtggctcatgcctgtaatcccaccactttgggaggccaaggcagtggatcacaaggtcaggagttcaagaccagcctggccaatatagtgaaaccctgttttactaaaaatacaaaaattagcctggcatagtggcgggcacctgtaatcccagctactcaggaggctgaggcaggagaatcgcttgaacttgggaggtagatgttgcagtgagctgagatcacagcaatgcactccagcctacagagcgagagacccctctcaaaaaaaaaaaaaaaaaaaaaggagttccttgacaaaagaaatgtggaatttgctgccttgaactaagttaaattagctgctttgttgcaggaattttcattaatatgctagtccatgataacctgtataaaaggatcctcttgggcattactttctgggttttttgtttgttttcagaaacagggtcttgctctgtcatccaggctggagtgtcatggtgtgatcatatatcatatctcactgcagcctcgaatttctgggctcaagctatcttccagcctgaacctcctgagtagctaggactgcaggtgtgtgccaccatgcccagctaattaaaaaacttatttttgtacagatgaggtctcattatgttgcctagagtggtctctattcctgggctcaagaaatcctcccctctcagcctcccaaagcactgagataacgtgtgtgccactgtgcttggcctgaattttttattttaaaatacattttgtgagctgtgcttagtaatgcacacctgtagtcctagctacttaagaggctgaggcaggggcatcgcttgagcctaggagtttgagaccagcctggacaacacaggaaaaccccatctttacaaataatcaaaaaattagccattactcgggaggctgaggcatgagaatcgcttgagcctgagaagttgagctgcagtgagctgtgattgcaccactgcactccagtctggctgggtgacagagcatgaccctgtctcaaaaaaaaaaaaaaaaggaaaaaaaattattcaacaacagttgttaaagcacaggaagggctgggcacggtggcttccgcctgtaatcccagcactttgggtggctgaggcaggcagatcacatgaggtcaggagttcaagaccagcctggccaaaatggtgaaaccccgtctctactaaaaacacaaaaattagctgggcgtggtggcccacacctgtaatcctagccactggagaggctgaagcatgagaatctcttgaactcgagaggcagaggttgcagtgagccaagatcacgccactgcactccagcctaggcaacagaacgagactccatctcaaaaaattaaaaaaattaaaaatagaataaggcacaggaaaggaaggctttattcagagccattacgatagagagaggggccacagtggcagggccttgcagtgagggagacaggttgggctcaactccaaatactgcatggggaagtgggaattcatagcccaggatcgggtggggcgcagtggattgaaagttactaagaggaaacatcaggggtaaggggggattctggctaaaccagcctaacaggattcttgctgaagacaggcccaggtgatcagacatcacataggggctggtggaggatgaggaacctaatcagatgttgaagatgggagagggttctcgataaactgacttagcagggttctttgctaaaactggatttgacaagggagtacacagatgagcctagcagaagattcagagacttgactagtttggccatgcaagaatttcttttttgttttgtttttttctgtttgttttgttcggctcactgcaacctccacctcctgggttcaagcgattctcttccctcagcctgtggagtagctggaattacaggtgcctgccaccacacccggtttgtgtgtgggtgtgtgtatttttagtagagatggggttttgccatgttggccaggctggtctcgaactcctgacctcaagagatccacccacctcagcctcccaaagtgctgggattacaggtgttgagccacctcgcccggcccaagcaaataatttttatcagggaattgactccaaagaaaaacaataggagaggaggtcctgcagggtcacagcccatacaagagtctggccgcaaggaagcctggtaagaggagagggaacagagcggtgctgacctgctgaagggaaggcagaggtcggacaggtacccggattagtcatcacataacaacttggcatcagccatgctctgccatctactgtgtggcctcaggcaagtgactcactctctctgaacatccacttcctctcatgttggtttctttctcagaggcttgtgagaggccttggcaagccatggccataaagcaatcactggctgggcatggtccctcacgcctgtaatcccagcacttttggggcaccgaggtgggaggatcacttgaggccaggagttcaagaccagcctgggcaacatagtgagacctggtccttacaaaaaataaaaaaatgattcaggtgtggtggtgcacacctgtagtcccagctactctggaggctaaggtgggaggatcccttgagcctaggattttgaggttgcagtgagctataattgtgccactgccctccagcctgggtaatgaagtgagaccctgtctcacttttttttttttttttttttgacatggagtcttgctctgtcaccaggctggagtccagtggtacgatcttggctcactgcaacctctgcctcccgggttcaagtgattctcgtgccacagtctcccgagtagctgggattacaggcactcaccaccacacccagctaatttttgtatttttagtagagacggggtttcaccatattggccaggctggtctccatctcctgacctagtgatccacccgccttggcctcccaaagtgctggaattacaggtgtgagccactgcacctggccaagaaaaaaatttcttgcttatacaaagtcagctgtgggtctgggtgactatcaagagcagaagtgctcgatgccagggctcggccctcttccttcatgtggcacctccaggtttgctcagctcctagtgtgacccgggcaggagaaaacagagcatggagcattctgcactgccttcccctgcgcccgccataaacacaaggtcttgctctgtccactgggctggagtgcaatggttgcactggtttttaaatgcttctacaaggagcatttaaagtgttctacatccaacacttctacttacattttattggccaaagtaagtcagataactcctgagttcagcagatcctgggagatggcggagggcattagtaatgcttgccctactgtctcactgctggtgctgaaaatccaatgagaaaatacacacaaaacatattcattcattcaacaaatgtttactgggcacctatgatgtgccaaccactgttctaggaactggatacatacctctgagtgagtacatagcagtgaacaagacatatagaaatcccagtccagccgggtgcagtggctcacacatgtaatcccagcactttgggaggccaagcggatggatcacctgaggtcaggagttcaagacaagcttggccaagatggtgaaacaccatctctactaaaaatacaaaaattagctgggcgtggtggcgggtgcctgtaatcccagctactcgagaggctgaggcagagaattgcttgaacccaggaggtggaggttgcagtgagccgagatcgagccactgcactccagcctaggcaacagagtgagactccgtctcaaaaaaaaaaaaaaatagaagtcccagtccgtggcaagctcacatactagcggaggagacagaaatctggatcaatatgtaaagtacacagggctgggcgtggtggctcatgcctgtaatctaagcactttgggaggctgaggtgggtggatcacctgaggtcaggagttcgagaccagcctggccaacatgatgaaaccttgtctctactaaaaatacaaacaaattagccgggtgtggtggtggacacctgtcatcccagctacttgggaggctgaggcaggagaatcgcttgaacccaggaggtggaggttgtagtgagctaagaccgtgccattgccctccagcctgagcaacaaaaatgaaactccatctcaataataataataataataataaaacaaaaaaaaaagtacacagtacgtgagcgggtgataaaagacaggaccttcccgtgatcactagatgtgtagacatgaaagatctgcttcccagacctggggctggagaaggtcttggtaagggagtggtggcctcatgtcttcatgtctgccctgagagaggctgtttggatgttgctgtgcttgcagggcctccatgctgagttttgtctctgttcagctgggaacatgcaggtgaccttgccaggcaggcatcttctcactttctccagggcgaagagatgagggcagggaggtgacaggacagatcactaggggtggctgtcatgagaactttaggctggagtgcagtggtgcaatcaaggctcactgcagcctctacctcctgggctcaagtgatcctcccacctcagcctcccgagtagctgggactacaggcacatgccaccatgcctggctagtttttggtattttttgtagagatggggtcttgccatgttgcccaggctggtctcaaactcctaggttcaagcgatcctcctgcctcagtctcccaaagtgctgggattccaggcatgagccaccgcacctggccctgttgtgagaacttctgactctttcctggagtggggtgcagccagggcagggctctgagcctacagggccctgacctgactcaggtggtctcaggcttcctctggctccacaagaggagcagacagcagggagcagacagaagggagcaggctgtggggtgtccaggtgggaaaggatggaggctgtggcagggtggggacagtggaggggaagagtttagtttctgtaggtggagccaataatatctgctgacaggttggagtgggtgtgaaggagagaggtgaaggaccaccccggagtgtttggcctcagtcactggaaggacagagctgccactgacctaggtggggaaggtagtgagggagcaggttctggaggaaggtcagaagctcagtttaggatatgtaaagcttaaaatgcctctaagggccaggtgcattggctcacacctgcaatcccagcactttgggaggctgaggcgggtggatcacgaggtcaagggattgggaccatcctggccaacatggtgaaaccccgtctctactaaaaaatacaaaaattagctgggcatggttgcgcatgcctgtagtcccagctactcgggaggctgaggcaggagaactgcttgaacctcagaggtggaggatgcagtgagccgagatcgcgccactgcactccagcctggtgacagagcaagactccgtctcaaaaaaagaaaagaaaaagaaaaaggaaaaaaaaagcctctgagatcttccatcctttcccatggaaatggtgaatatgatgcaggatgtaggagcctggagttcgcaggaggtgtctgggctggagatagaaatttgggggttagggttagggccaggtgcagtggctcacgcctgtaatcctagcactttgggaggctgaggtgggaggatcacttgagctcagagttcaagaccagcctgggcaacacagtaagacctcatctctacaaataattaaaaaagaaaaaagataaaggaaatttggatgtttgccgggcgtggtagcttgtgcctgtagcagtagctattcaggaggttgaggcaggaggaggattccttgaggccgggagttacaggctgcagtgagctacatcacatcactgcattccagtctgggtgacagaacccctgtctctaagaacaacacaaaaaactgggcgttggccgggtgctgtggctcatgcctgtaatcccagcactttgggaggccaaggcgggtggatcacaaggtcaggagatcgagaacatcctggttaacacggtgaaaccccgtctctactaaaaatacaaaaaattagccagcgtggtggcaggtgcctgtagtcccagctactctggaggctgaggcaggagaatggcgtgaacccgggaggcggagcttgcagcgagcagagatcgcgccactgcactccagcctgggcgacagagtgagactccatctcgaaagcaaaacaaaacaaaaaactgggcgttgatagcctagagacaggatttaagctgtgcatgtaggggaggcaccccatggcatgagtggtacagagaggaggatagagacctaacacctggggctgccgggaataaggggttgggggccagaactagatgacaatatggttacgattggcagtgagtgccatgagaaagtacaagtcattttgaaagcatataactggaagcctcacctagtctcaggttgggtggagacagggaggtctttctggaagagatgactcctgaggtgacacctgcagcctgagtagctacacaatcaggccagaaaaaaaaaggcagcaggggagttcctggccgagggcatgagggctggcagcaagtgagcctcgggagagggcagagagctggagcagtcagtctggcagggaggggtgtggtgagaagggaatctggattagtcatcaccaaaagatctgtgccaagcccgggttcagatctggttctgccaccctccgtgaccctgcctttcagaatctccattctctctcctgccctgcagacaaggcttgtgtagcagttaccttggcctggccccagcaaggcctcaggaaacatcagctgcaactagttttgtctgttgtgatgttgttatttgacctattatattaattatattattaacgcataagggtagtggttaaggatacaggctagggagagtgactgcttgggtttaacctcagagtcggtttacttatctgtaaaatggggataataaatagcatctatgtcacagggctgttaggagaacaagggaactgatggacgtcaagcacttggaggagtggttgatggttacttgtttttgtatcttttttttttttttgagacagtttcgctcttgttgcccaagctagagtgcaatggcacgatctcgagtcactgcaacctctgcctcccgggttcaagcgattctcctgcctcagcctcccgagtagctgggattacaggcacacgccaccacgcctggctgattttttgtatttttagtagaaacaggatttcaccat[137 bp omitted]tgaggaatacagctggcctcgaggctgagggaacagcatgagcacagacacagagctaatgggggcatttacaaagcatttatcaccaatttatttatttatttattggagacggagtttcactcttgttgcccaggctggagtgcaatggtgcaatcttggctcactgaaacctctgcctactgggttcaagcgattctcctgtctcagcctcccgagtagctgggattacaggtatgcaccaccacatccggctaattttgtattttttagtagagacagggtttctccatgttagtcagactggtctcgaactcccgacctcaggtgatctgcccgcctcagcatcccaaagtcctggggttattggcatgagccactgtgcccagtatttatttgagacagagtctcgctctgtcacccagattgtagtgcagtggcatgatctcggctcactgcaacccccgcctcctgggctctggtgatccccccacctcagtctctagagtagctgggactaggcgcatgccaccacattcagctaatttctgtattatttgtagagacaaggtctcactatattgcccaggctggagtcaaactcctgggctcaagagatcctcctgcctcagcctcccaaaatgcagggaatacaggcatgaaccacttcacccagccaccacttaagttttttttttaataatcagtattgctgcagatatcatttaattttgatagggggcctagtggtatggagcaacccatgttcccattttacagatgagaaaatcgctgctcaggaatatcaagccactcttttggggttgtgcagttattacagggcacagccaggattcaactcaagcctagccagcctgcagggtaggggataagagccagccagcctgcctgggggccagatttagctccccccgatgagtcctgaaaaagtactggactcccgtggctcatgcctgtaatcctagcactttggcaggccgaggcaggtggatcacctaagatcaggagtttgagaccagcctggccaacatggtgaaaccccgtctctactaaaaatacaaaaattagctgggtgtggtggtgcatgcctgtaatcccagctactcgggaggctgaggcaggagaatcgcttgaacctgggaggcagagactgcagtgagctgagatggcgccactgcaccccagcctgggcaacagagcaagacgctgtctcaaaacaaaaaaaaaaaaaaagaaaagaaaagaaaagaaaccaggctatgtaaaaatattattgtaaaaaattaaattaaatcaaaaaaaggccggtagcccatacctgtaatcccagtacctcacagtactttgggaggctgaggcaggaggacggcttgaggcccggagttcaagagcagcctgggcaacatagcgagacctccgtctctattatgtaaaaacaataatattttttaagtaaataaagaaaccaggccgtggccaaaggaatcttcctgtgtctggggccttctttagaggctagcatactgaggacactctttgggccagtccaggaaggaatgattctggtggcccctgactggggcgggggcgtggtaaggttcgcctgggaggcggcgcaggcgctgcctgcggtttgactgccatccgggctgctgcaggcactgggaaaggcaatccagcctcaatcctcgccacagacacgggcgactgtcccccagcgtgtgagtcaaaccatactccaggcctccaggaggtgtttgtcgcgacaacacctgcagagggcccgtgcggagtcccttagtgagcggaccgaaaaccgccaccctggaaggatattggcatgccctagggtgaaaattcacactacgacactcggggggtgggtcccctccgagttctcgtccgcgggtgcctccacccagacctgaggggtgtcgggaagacccccgcctaccgagtcagggcgggattaagacctccggcgctggaaacgcgtagggcggggcccagacctggatccagctagccgggcggtgtggggtgcgcatgcgcaatgtccgcttcggctctaggaccgcgcgggcgacagcagggccgcggtgcagtgtccgacccgagagttgcggcctgagtcaccggccccgccctccggagccggacgctgcgggaggcccgggagcggcagtggaaccgactcccagaactccggacgtgtgcggcggtaagcgcccggcccgtaccccctccgcaccccgcaactccgactttggcggcccccagacccggcgaaaccgtgaagtctcggcctcaggagccccccagatccatggtctcagattcgaaccctcagacctgttcgatctccttttatgccgtcccggggacccttctccaccctctgtctcatgatccaaaatacaggcccataggtttcagagataccctgtgaattcttccttggggtgtcctgaaccgcgatcgtagatctgtgcccccagttccagcggggaaccccattgtccgggaacccagagctcacagccacgatcttagacccgagcccacagagccagaggtgacactggaatcctgccgctgggaatacctaaattctcaagcccacatttgggatttcctaaaccccgccctggggccctttaggccgtggatgtttgctccgcgcccatgacctgccaaggacctctacattcaggctgggctctggatctcacattctagcgcccagacatgtcgggaacgccttacgccaacttggggtccccaccaagagaacccccaccagatctgcaccctccccttcacgcgtgcacccagtccaggctccctcaagccccacgggtgccttttagacctgaggaggttgcaaacctgatcccccatacctgccccacccatccgcggacaacccgccctcgcaaactcagacccccacccggaggcttcagattcctcccaggtccagctgccggaaatgcgtgtttgaagggagggtgtgggctcaggggcgaagcacccactggtccccttttttccccccagcagtgagtcgcagccatgttcctggttaactcgttcttgaagggcggcggcggcggcggcgggggaggcgggggcctgggtgggggcctgggaaatgtgcttggaggcctgatcagcggggccgggggcggcggcggcggcggcggcggcggcggcggtggtggaggcggcggtggcggtggaacggccatgcgcatcctaggcggagtcatcagcgccatcaggtaaggcggagactatcagaggggcggggcctgggaatgggaggagcctcagtgaggcgtggtctgggaggggcgtggtctaaaaatagaataggattaacctggaggctaacctgggtacatgaattaggccggggaggcctggtttgagagttctgctgtaagggggtggaccccagtgaggcggatatcagtcattgggggcggtgcttgatatgggagtagtctgattgtgtgggaccaggacaatgtggtcctgaggggactgatgtggagttttggcgggtggggcttatgggtctgggctcagcctgcattggctaacctggagatgaacgttaaaggtgcggagccaatgcgtctgagtgacattttacggaaggggcttgacttatgagtgtggtcagaggttttaggtgggttaatgaggaggtgagcccaggaggaagcaagacctaatggggtagggtaaatggcccagaatgggctgggcttgctgggaactggctggattaatggagaaaaatgccctggtagggatagggcaggttggcttaattagccacggccacttagcagtgatcccttgaaggggcggggaccaatggctggggtaggatgttgggaagacgggcatttaggaagcgggccatggagtagggtcttgggcagatggcacctgaggaggataaggccttgggaagctggggcagagcctctatgaagtgagccctccaaggggcggggtcttttgattctacgtgggattttttaggtttagggtggccaagatgactgaaatctgccactgggtaggtgtgcctggcaggaggggagcctcccaggggaccggtctctgggtttcctcgagggtggggttggcctgaggaagggagaagaggggcacgaccagggcagtgtggattgggacagatgaggacaagaacaaatgaaaggcacagcaaccaagtaaggaagataacggctggggtctggagcgttggggctgatggttctgtagtgctgcccgttggaggccccgcccctggcactaacccctcccccttatctcttcgcagcgaggcggctgcgcagtacaacccggagcccccggtaagccccctctgcaaccagacccccttctcctgccaaggcctcttcgaggtcccatccctgttcctgtagagaagccccaccttcctccccttcttgtgaaattcctctgccagttcctcccatgccgtgtctgcagcttcgccatgggtcttagccatgccccacatacgtgcaccccattcactaccacccctcattcttttcctcatcaagctgcccagcccactctgacttccccacccagggtacctgggtttggggagccgtcctggccgggttcccctccccctgctctgagctctcctccctttgcagcccccacgcacacattactccaacattgaggccaacgagagtgaggaggtccggcagttccggagactctttgcccagctggctggagatgtaagtaacctggggtccctggccccgtcctaaccgttccatcccttcccttgtggctgcccttgcacacacacccttgaccatgacaatcccagtgttcccattctccatgacattctcagacccctttcagtcacccctgacctgcccctaacttccgcccgcaggacatggaggtcagcgccacagaactcatgaacattctcaataaggttgtgacacgacgtaagtgaccggggttaaggaatagggtagattcagaggcagaggggtcagagaggatttgacctctggcctctgactttcaacctgttacccacagaccctgatctgaagactgatggttttggcattgacacatgtcgcagcatggtggccgtgatggatgtatccttgggggcagtgtgggagaggccctgggtggacagagagttttttgagagtatgtttgggaagccaacatgtagctttcatatccacagatgtggaaatgcattcatcagaacacagtcacctgcagacatgtggcggtaaatcataacaatgccagctgtcacagctggcactttaattatataaagtgaccgaaccgtcataaccaccctgttggacaggcacaattattatattccattttacagaagaggaaactgaggctcagtttcctgaaagaagcagtcatttgtctcaagttatagataaaggtcaggcatggtggctcatgcctgtaatcccaacactttgggaggctaaggtgggcagatcacctgaggtcaggagtttgagaccagcctggccaacatggtgaaaccccatctctattaaaaatacaaaaattggccaggcacggtggctcacacctgtaatcccagcactttgggaggccgaggcgggcggatcacgagatcaggagattgagaccatcctggctaacacagtgaaaccctgtctctaccaaaaaaaaaaaaaaaattagccgggcgtagtggcgggcgcctgtagtcccagctattcgggaggctgaagcaggagaatggcgtgaacccgagaggaggagcttgcagtgagccgagatcgcgccactgcactccagcctgggcgacagagccagac[136 bp omitted]cggtgaaaccctgtctctactaaaaatacaaaaaaattagccgggtgcagtggtgagcgcctgtagtcccagctactcgggaggctgaggcaggagaatggcgtgaacctgggaggcggagctttgcagtgagccgagatcgcgccactgcactccagcctaggcgacagagagagactccgtctcaaaaaaaaaaaaaaagaaaaaaaaagaaaaataacaataacaaaaattagctgggcgtggtggtgcacgcctgtagtcccagctactcgggagtcccagctactcaagcaggagaattgcttgaacccgggaggcggaggttgcagtgagcagaggtttcgtcactgcactccagtctgtggactcaggtcttttgggcttgagaacccacgtttataacagccacatgcgcatatacacacacacacacctaagagcacacccacatacgtgaaggtgtatgaggcagtgtgcacagggacacacgtgttatctgtacatgggccagccattagctgatcttggatacatgcatatttttatttatttttgttttaaaaaatattttatagagaaaagctttcactatattgacctggcaagtctcaaactccagaccttaagcaatccttccgccttggcctcccaaagtgttgggattacaagcttgagacactgcgcctggcctcatgcacatttaacacatagggcaaacagacacatacataatatacatgtcatgtaatcacagacatattgcatagagcaaagcaatcccaactctacctcttaaccaggttattgaaccgctctgtgcctcagtttctctctctgtaaaatgggtgagtgataatggtgataccgaatcggaactacatccaaaaggtttagcacagtgtatagcgcatagtatgtggtctgtacacattagctcttaactatgatcttgggtagagttttcagctttgaatgttttcttctctggaaatagtcctggtagaactggtgtcccaaggatttagtgagaaagtgatgttcctgagtggacatcaggtggatcctgagttcaagcgatccacctgccttggcttcccaaagtgctgggattacaggcatgaaccaccatgcctggtcacacacttgtttttcacatatcctaacatttttatgaaattgagttactgtcaagaattttcttttctttctctttttttttttttttttttgagacagagtctcactctgtttcccaggctgaagtgcggtggtgccatcttggctcactgctaactccacctcctaggttcaagcagttctcctccctcagcctcctgaatagctgggattacaggtgtgcgctactacagctggccaatttttgtatttttagtagagacgggatttcatcatgttggccaggctggtctcgaactcctgacctcaagtgaaccgcctgcttcggcctcccaaagtgctggattgcaggcgggagccaccgtgcgtggcctattaagaattttctgaatgagcaattaacaactcttcaggcaaggaatttgtactttagagtagttgaatataattcctcatggttatgtttaaagagaatccctatttagaaatgtaagtgacaatatgtatggataaaatgaaaaataaaaccgcacaccaggtgatatgactaggaccaagcgggagctggagtttcagccctggctgccctgcttgctgtatcaccatcgtgtccacagtgcatgtgatgcatgcatctgggtgtagctgtcactcttcttaacaccctcccaccagagcgacaccacaggcaagctgggctttgaggaattcaagtacttgtggaacaacatcaaaaggtggcaggtgtgtagaaacctctgaaatccctggcacccagacccccaagccatggagacactatgccccacaatgctcacttggacccaatgtctctgtcctcacaggccatatacaaacagttcgacactgaccgatcagggaccatttgcagtagtgaactcccaggtgcctttgaggcagcaggtatggctggcagggacatgctggggctgggagtgggatgggtgagaaaacctctactcagctggtctgggcctgactcctgggcatgggagtgggttgggccatgtggcccccgcacctgaaggactacatccatcttagggttccacctgaatgagcatctctataacatgatcatccgacgctactcagatgaaagtgggaacatggattttgacaacttcatcagctgcttggtcaggctggacgccatgttccgtgagtgacaacccagctgtcttcctgggtggggattcctatgacctctatggaccaaggtctcctctaagcctgactttgaggtgggcgatgctaggggcacagtggtgattgaatcagttccagtttctgccctcatggagctcacagtctggtggaggagacacaagtccccagacagtgacagttcagactggtgatggctgggagaggggaagctcagggcagagtgatgggttgtgatgggggcagcacaggccgagggtctagggctctggtgaggggaagagtgagcagagcgtgctcagattgtgcttggggaagcctagagggcaaatccaatccaggaggaacctgatgcagcccaaggggtcagggagggctcactggagagggaacattgagacctgaggggatgaggagagaacttagtgagaaggtagggaatactgttgcaggctgagggaacagcctgtgcaaaggcctagaagggaaagaagatggggcttctgatgctttttgttagatttctttctttctatttttttgagacagagtctgctgctcttgttgcccaggctggagtgcagtggcatgatcatggctgactgcagcctcaactcctaggctccagcagtcctcctgcctcagcttaccgaatacctgggagtacaggcacacaccgccatgcctggctaatttttaaaattttttgtagagacagggtcttgctatgttgcccaggctggtcttgaactcctgggctccagcaatcctcctacctcagcctcccaaagctttggtgttacaggcatgagccattgcatgtggccttctgagtgttagtgtactgaatgctgaagacatggctgggaagtggggattactgtccttattttgtgaaggaggaacttaggattcaaggaggcaaattttcatgctcatagtcacccagctaggaagttgtaaagccagaatttgaacttggatctatctgagatctgagctaagtaagagaaggtaggagcagtgagcatgattaggtcatgcaggattgtgggtgccaagtttgggggtgctcaaactctaccagagacattggggagccatggcaggttctaggcagaggga[138 bp omitted]cagtgaaaccccatctctactaaaaatacaaaaaattagccaggtgtggtggcgggcgcctgtagtcccagctacttgggaggctgaggcgggagaatggcatgaacccaggaggcggagcttgcagtgagctgagatctgccactgcactccagcctgggtgacagatcgagactccgtcttaaaaaaaaaaaatcccttggcctccaggccgggtgcagtggcttatgcctgtaatcccagcactctgggaggctgaggtgggcgtaaaacctgaggtcaggagttcaagaccagcctggccaacatggcgaaaccccgcatctactaacgatacaaaagttagccaggcgtgggggcgtgtctgtagtcccagctactcaggaggtttagggagggagaattgcttgaacccaggaagcggaggttgcagtgagcagaggtcatgccattgcactccagcctccaacctgggtgacaagagcgagattccatctcaaaaaaaaaaaaagaaaaaaagatcccttggcctccagagagcccacaatgcatgaaaagtaacagaggaaaagaagcaggtatgtgagatagcagggaggtgaagggagtggacagacaaggttgatgccacaagtcacataagaggggccaggaaatagccactggatctaccagcaagaaggctgatagtcgggaggatcatttgagtccaggagtttgagaccagcctgggcaatgtagtaggactccatctctacaaaaaaaaaaaaatatatgtatatagacatagccgggcatggtggcacatgcctgtggtctcagttgctcgggaggctgaggtaggagaatcacttgagcccgggagggtgaggctgcagtgagctatgatcttgccactggactccagcctgggccacagagacaccgtctaaaaaaaaaaaaaaaagggctgggcatggtggctcactcctgtaatcccagcactttgggaggccgaggtgggcggatcacctgatgtcaggagtttgagaccagcctggccaacatagtgaaaccccgtctctactaaaaatacaaaaaaattagccaggcgtggtggtgcacgcctgtagtcccagctactcaggaggctgaggcaggagaatcacttgaacctgggaggcaaaggttgcagtgagccaagatcgtgccactgcactccagcctgggcaacagagtgggactctgtctcaaaaaaaaaaagaaagaaaggcagccagggtgtgcaggacgctgtgggtatggacacctgagggtggtggtaactgagcggagatagtgtagtcatcatgtctagattccctgtgggtggggaacatggagtcaagtttcagggcaggcgtggggacctacctgtaagactctaggggcaggaagtagagtgtgcagagcctccctctagtagcctgttaggcttagaactggagaggatggagcatagatgtcagtaggaggctggggctgggcagaggtgatatcagtacacagaggccattattgaggagggtaacagattggattccaatcctgatttcttcactttcttgctatgtgacctggggcatggcccctcccttcctgcctcatttctttttttcctgtttttaatttttagtttttttaaaaagcagagatgaggtctctgttgcccaggttggtctcgaactcctgggcggctcaagtgatcctcccatcttggccttccaaagtgttgggattataggtgtgagccaccacgcccagcctgtgcctcattttaaaatgacacttatctcacagagttggattaaatcagccaatacctggaaagcactttaccccatgcttggcacacagtaaatactcagtgaagtgccagctgctatgattgtcatcccatgtatttgtgtaatgttattatgccaaaaaccagtctccttccttccctgccgccaaacctctgcatctcctcctccaggtgccttcaaatctcttgacaaagatggcactggacaaatccaggtgaacatccaggaggtaaggacccccatattggggtatgggtgcctgggaggaccccacccctcagcccttcataccagctctgagctgcagtccccttcctcctattttgccagccgtccctgggtgagggcaaaggggctggtgctcttggggttccctgtcctcactctccaccctcctctccccagtggctgcagctgactatgtattcctgaactggagccccagacccgccccctcactgccttgctataggagtcacctggagcctcggtctctcccagggccgatcctgtctgcagtcacatctttgtggggcctgctgacccacaagcttttgttctctcagtacttgttacccagcttctcaacatccagggcccaatttgccctgcctggagttccccctggctctaggacactctaacaagctctgtccacgggtctccccattcccaccaggccctgcacacacccactccgtaacctctcccctgtacctgtgccaagcctagcacttgtgatgcctccatgccccgagggccctctctcagttctgggaggatgactccagtccctgcacgccctggcacacccttcacggttgctacccaggcggccaagctccagaccgtgccagacccaggtgccccagtgcctttgtctatattctgctcccagcctgccaggcccaggaggaaataaacatgccccagttgctgatctctatgggatctgcctcctgatctgacccgagagaggaggggtggctcgggctctgggtcctggggagcaggggaggtagtagattcgtccccagggctggatccgtggatttcctcgtctttttctcgtcggcattttttgtctcatcctgagctgtggaggctgagacaggacccagaagccccagtgatctctgcttctgcttccagagtctgggctggagggaggtctcaatgccactcctggccctgtcccccaaggccatgtttgcccctcttgcagcttctccatccacacttggcctctgcctctgttgtgtcatggaccatgctcagtgtcttccttcccacttgaggacaccaccccacgtccccgggtcccgagggggagcctatgggtgctgtttggggtactcagcagagggctgagaggtagcaacatcctaggagtatccctggtccagcatgaggcaccgagggctgggggcagtgggcagtccacagggcagagatccctggctggtgggaggatgggcttggtggggaggggtggacacaaacacagacacacacagaggccagcgtttattgacacttgttcaagtctctcaggccccccaggcttcttggtcttaattcctggggaaggaggcccagccaagggagtacaagctgtagacagtgcctagaaaggggaagcgttggagacagaatgagacctaatcccctccctggacatcccaggcttttaaggccttcaggctccctggttcccagcctggaccccagctctagttcggactccagctcccttcccagattggactcctattgtaaagccccctggctttgatctagaccgggctgggagctttctccccgactcctccctgggcctcagccccaccactaacccagcccccgtcctgggacaagagcccaaaccctagttactcccctccctgcaggcctgactccagctcagtactcgacccccttcctaaacgccaacccccaacccagatcctggtcagtcctgcccagaaaccagccacctcttactctgggtccagccccgcctcccccgcagcccagacgggccctgcgctcaccgcccagacacagcgtcattgtcactcggtacaggatgttgtcaacgatgccgcccttcaggtacaacgggatgtcattgtcctcctggatgtgggggtgtctgatgagaaaggggtgctggctgctccttagagcgcgccccgcctgccccggctcggcgcgctcccggctggcgcgtcggatccccaccccccccgaccccccacctggaagagcttctgtttctcgcgcactcggttctgaaagcggttccgggcggtggagctgaaggagcggatcagcgcctgggacacctgcggggtgggaggtgggcgggtattggaggcacctggaggggtgtcctgaagtgggaccccgctctctgaggcctggacgtggggacagccccatccctagcgagcgtcccaaaggcgaggagggtaatagcttggattctgttacccgcgaactgccagctgggttgggaggggactcgccctggagtctggcctgggggtgaccgggctgcctagagggtcctggaagggagaggacccagaaggactttgttctggggggcctaagtcctgagatttttgttgggggagggtttcctggattaaagggaggaaaccaggtcccgggaacgtggggaccggaatggaggtccccgggagcgtccaggctgcctgagaaggcccgggtgaggccagtgttaagggttcccgagatgtcaagttcaaacccggggctttgggccggggtgggggtccccagttgtctccgaagagtggattgtgggggaagggacccaggctgtttagcggggagtcccaggccctgaaggtggctcacgttccaaggccctagatgcgggggcacttggagagtcgcgtattagggcggggttttctgggtggggggctccggcccagcccatgggggcctcacccgaagggcctgcattctgccttgtcctcttccgccggagtcacctcccttctccgcccaaggacacgcgtagtcctcctctgtccaggaaccccaggccccacccgctgcgcgcagcgtgacagctggggacgcggcggggctggggctggggctggggctgggttgcggggagtcctgctcctcggattcgtccaccacggaggaggcggtccagacccgcaccctgggccgcagcgcgcatccgtttcggtctcggaatttcgcttggtcccaccggagcccaaagcggtaccagggaatacatttttgcagatttttggagatttccgccgggggcaagtgcaactcctccccggatctctccctgcccgctggtatgtgagagtgaggaaacgcataaggccgtgttccaactccctgttctgtctacacagccagagattgcacctccgagcctgtttccgtatctgtaacgtgagggctaaggcaggatctttctcagagatttgttgagacattaaatgaccttgtttttaggaaacacaagctaaagtctttgggagtaaaacggtattttatgttaccctaagaaacacatcatatctatttatagctctctaattctggcagtcaacggggtgcagcacagttgtcctaatggttttagcaaccaggaaagatcctggcctagtctacaaggttttctttttcttttcttttttttcttttttttttagacagggttttgctctgttgcacaggctggagtgcagtggtgcggtcatagctcactgcagcctcgacctcctgggttcagcgatcctcctgcctcagcctcctgagtggctgggactacaggcgcccaccaccatgctcgaactaattttcgtattttttgtagaggctgggtttcaccatgttgcccaggctggtgtcgaactcctgagctcaagaaatttgccggcctcatcgtgagccacgcacccagccagcagacaatgtttgtttgtttgtttttgaggcagtgtcttgctatgttgcccagggtggtctccaactcctccaagtaatgttcctacctctatcacccaaagtgctagaattagaggcatgagccactatacccagcttgtaaaaggttttaacaatctcttttatttatttatttaatttatatttttagacagagtcttgctctgttgtacacgttggagtgcagtggtgtgatctcggctcactgaaaccttctgcctcctgggtttaggcaattcttgtacctcagcctcctgagcagctgggattacaggcacccgccaccacacccagctcatttttgtattttttagtagagatggggttacaccatgttggccaggctggtctcaagctcccaacctcaggtgatccgcccactttggccttccaaagtgctggaattacaggcctgagccaccgcttccagccacggtctcttttaaagagggcttttatgattattaaattcccctaacactttcaaactatgcttgtaaatttaatgttaggtttttccatttaagagccacaagtagggctgggcgtggtggctcacacctgtaatcccggcactttgggaggccaaggcaggtggatcacttgaggctgggagtttgagaccagcctggtcaacatgacaaaaccctgtctctactaaaaatactaaaattaaccaggtgtggtcatgggcgcctacaatcccagctgcttgtgaggctgaggcacaaaaatcgtttgaacccaagaggcacggaggctgcagtgagccaagattgcaccactgcactccagcttgggtgacagaacgagattctgtctcagaaaaaaaaaaaaaaaaaagctgacttaccagataaacagatgactctttcttcaattcttaaataacttttatgaataaaaaattcataaactgtacataaacagatttcaagtaagtcttagtcaccagctgaattccacattttacaatggaattacaagattgacctgttatttgaataggccagtttaccttaaatattacaaattcttaaaataccaagtattcacagattctctaacacaaagttaataccatgggggccaggcactgtggctcacgccagtaattccaacactttgggaggccgaggtgggtggatcacctgggtcaggagttcgagaccagcctggccagcatggtgaaaccccgtctctactaaaaatacaaaaattagccaggcgtggtggtgggtgcctgtaatcccagatactccggaggctgaggcaggagaatcacttgaacctgggaggcggaggttgcactgagcagagattacgccattacactccagcccgggcaagagagcgagactccatctcaaaacaaaacaaaacaaacaagttaatactatggttttgactgtcttaattttcttttttcttttttgagacggagtcttgctcagtcacccaggctggagtgcagtggcgccatctcggctcactgcaagctccgcctcccaggttcacgccattctcctgcctcaggctccccagtagctgggactacaggcgcccgccaccacgtccagctaagttttttttttgtatttttagtagagacagggtttcaccg[137 bp omitted]caggctggagtgcaatggcgcaatctctgctcactgcagtctccgcctcccgggttcaagtgattcccctgcctcagcctcccaagtagctgggactaggtgcacgacaccacgcctggctaattttttgtattttagtagagacgaggtttcaccatg[131 bp omitted]atgcgcgtccgtgtgaagagaccaccaaacaggctttgtgtgagcaacatggctgtttatttcacctgggtgcaggcgggctgagtcagaaaagagagtcagcgaagggagatagggatggggccattttataggatttgggaaggtaatggaaaattactgtcaaagggggttgtgctctggtgggcaggggcgaaggggtcacaaagtgctcagtgggggagcttctgagccaggagaaggaaattcacagggttaatcactcagttaaggtggggcaggaacaaatcacaatggtggaatgtcatcagttaatgcggggcagggccttttcacttttgtgattcttcagttacttcaggccatctgggtgtatacgtgcaagtcacaggagatgcgatggcttggcttgggctcagaggcctgacattcctgccttatgttaataagaaaaataaaatagtgtcgaagtgttggggtggcgaaaatttttggggggtggtatgaagagagaatgggcgatgtttctcagggctgcttcaagcgggattaggggcggcgtgggaacctagagtgggagagattaagctgaagggagatcttgtggaaaggggtgatattgtggggatgttagaagaaacatttgtcgtatagaatgattggtgatcgcctggatacggttttgtatgaattgaaaaactaaatggaataagaaaaggagcaaaacaggtataaaaggactaagaattgggaggacctaggacatctgattagagagtgcctaaggagattcagcatagtcctgccagcaaagattatttatttacttcaagagttaagagtggcagtttggggatagcatgaggagatatcagctgtgatggcttggagaaactgtgtaaactggcagtgtaaacaagagcagggcatgtatgagtagttgagaacggtgaataggagtatgactagacagaagatagtagggatgacaagttattcgggggcacagtctaagttggtctggtgtctggaatgagactggggcctaataaaaaggagcgtctatacaggagcttaaatgggctgtagcttgtagcattctgaggacaggtctgacttctgagaagggaaagtggtaaaagtattgtccagtcctttttaagttggtggctgagcttggtgaggtgtgtttttaatagaccattagtctgtcactgaatactaagagctggaaaaaatgcttggctgatttgactaataaaggctagtctgttaccagactgtatagaggtgggaaggctaaactgaggaattatgtctgacagaagggaagaaatgactgtggtggccttctcagaccctgtaggaaaggcctctccctatctagtgaaagtgtctacttagactaagaggtattttagtttttgtgactcggggcatgttgagtaaagctaatttgccagtcctgggctggggcaaatgctcaagcttgatgtgtagggaagggagggggcctgaataatccttgaggagtagtagaataacagatggaacactgagaagttatttccttgaggatagatttctacaatggaaaggaaatgaaaggttctaagaggcgggctagtggcttgtactatagcatagcctgcctttgctggtgtgtggcgattaggcctggtggaactgccatcaataaatcaagcgtgatcagggtgaggaacagggaagaaggaaatgtggggaaatgggatgaacatcaggtggatcacagagatgcagtcatgggggtcaggtgtggtatccggaataatgtgggaggctggattgaagtccgggccaggaacaatggtaattgtgggacttaacaaaaagtgagaacagctgaaggagtcagggagcagaaagtatatgcgtcaggtgtgaggaagaaaatagattttggaagttatgagaaatgtagagagtgagttgagcatagtttgtgattttgagggcctctaatagtattaaagcagtggcagccgctacacgcagacatgagggctaggctaaaacagtaaggtcaagttgtttgcacagaaaggctacagggtgcggtcctggctcttgtgtaagaattctgaccgcactaaccatgcctaggaagggaaggagttgttgttttgtaagggatcgaggtttgggagattaatcggacacgaacagcagggagagcacatgtgtttttacgagaattatgccgagataggtaacagatgaggatgaaatttgggcttgactgaagtaatggggtctgtctgtgaagccttgcggcagtacagcccaggtaatttgctgagcctgatgggtgtcagggtcagtccaagtgaaagggaagagaggctgggaagatgggtgcaaaggaataggaaagaaagcatgtttgagatccagaacagaataatggattgtggagggaggtattgaggataggagagtatatgggtttggcaccatggggtggataggcaaaacaatttggttaataaggcatagatcctgaactaacctgtaaggcttttccagtttttggacaggtaaaatgggggaattgtaaggagagtttataggctttaaaaggccatgctgtagcaggcgagtgataacaggctttaatcctttcaaagcatgctgtgggatgggatgttggcactgagccgggtaagggtgattagcttttaatgagatggtaaggggtgcatgatcggtcaccaaggagggagtagaggtatcttatacttgtgggttaaggtggggggatacaagaggaggatgcaaaggaggctttggattgggaagaagggcggcaatgagatgcagctgtagtccaggaatagtcagggaagcagataatttggttaaaatatctcggcctaataagggaactgggcaggtggggataactaaaaatgagtgcataaaagagtattgtctaagttggcaccagagttggggagttttaagaggtttagaagcctggctgtcaatacctacaacagttatggaggcaaaggaaacaggcccttgaaaagaaggtaatgtggagtgggtagcctccgtattgattgagaaggggacggacttaccctccactgtgagagttacctaaagctcggcatctgtgatggtctacggggcttccgaggcaatcgggcagcgtcagtcttcagccgctaagccaagaaggagtcagtcagagagccttgggcaagagttccaggggctctgggagtggctgccaggtgagttgaacagtccgatttccagtggggtcctgcacagatgggacacggcttaggaggaatcctggactgcaggcattccttggcctggtggtcagatttctggcacttgtagcaagctcctgggggaggaggttctggaggaacgcctggccgctgcggttcaggcgtttggaagttcttgtgtgctggagatgtggctggggtttgtctcacagtggaggcaaggaattgcaacttttttttattattgtacaccttaattaagtcctgttttggggtttgagggccagattccaatttttggagttttatttaatgtcgggagcagattggataataaaatgtatattgagaataagatggccttttgaccttttagggtctagggctgtaaagcatctcagggttgctgccgaacaagccatgaactgggctgtgtttttatatttgatgaaaaagagcctaaacgcttctgatttgggataaagaaaaagcattaaccttgactatgcctttggctccagccacctttttaagagtaaattgctgggcaggtgggggagggctagtcacagaacgaaactgtaagctggaccaggtgtgaggaggggaggtgataaaaggattatagggtggaggagcggaggctgaggaagaattgggacctagctcggcccggcgaggaggggagaggtcagatgggtctgtagaaaaggaagattagaaagactcagcaatgcttggggttgggagtgaggggacaggtgggagggaaagaaggaagatttgggacgagttgcactgggcacagagactaggaaaggactgatgtgtaaaagaatgcctggacatcaggcacctcagaccatttgcccattttacgactagaattatttagatcttgtaggatggaaacattgaaagtgccgttttccagctatttggaactactgtggagtttgtattggggtcaagcggcattgcagaagaaaataagacgcttagattttaggtcaggtgagagttgaagaggtttataagttcttaagaatacaggctaagggagaaggaggaggaatggagggtggaaacttgcccatagtgaaggaggcaagcccagagaaaagagtagagacacggagaaggggcgggggtttcttgcccttcagaaaagcagagaaagggttggggcatggaaataagggattgggggttcttgccccctagaaaagtgggacttaccactaacggtgaagaaggggttgaggggttcttgctcctgccccagaagagcagagaaggggtagagacacggagagaaggggttggggtacttgcccctccccgagaaaagcgggacttgccactaagggtgaaggaccaaggcaggtgtccctgcgtggtttgacacctttgaaacgtgggggaataatcagagaggtggccctgcaatgattaaacaccaagggaaggctgccttcccagtccgtgaccggcgccggagttttgggtccacggataaaacgtgtctcctttgtctctaccagaaaatgaaaggaattgaaattaagagaatggagagattgaagtgtggcgccaagattgaaaggagaaagaggttgagggatagggaggttggagaagagagtaaaaagaggccgcttaccggatttgaaattggtgagatgtttcttgggctggtcagtctgaggacctgaggtcataggtggatctttctcacggagcaaagagcaggaggacgggggattgatctcccaagggaggtcccccgatcagagtcacggcaccaaatttcatgcgccacatttcatgcgcgtccatgtgaagagaccaccaaacaggctttgtgtgagcaacatggctgtttatttcacctgggtgcaggcgggctgagtcggaaaagagagtcagcgaagggagataggggtggggccgttttataggatttgggaaggtaatggaaaattacagtcaaagggggttctctggtgggcaggggcagggggtcacaaagtgctcagtgggggagcttctgagccaggagaaggaaattcacagggttaatcactcagttaaggtggggcaggaacaaatcacaatggtggaatgtcatcagttaatgcggggcagggccttttcacttcttttgtgattcgtcagttacttcaggccgtctgggcatatacgagcaagtcacaggggttgcgatggcttggcttgggctcagaggcctgacagtttatttttgcctcttggttcagcgacacaaggacctcaaaatgttcaggtggaagtcttatctcccagttgttggatccattgttgtgtgcccagtggaagcattcctctccatgaggaccaaaatctctaaactagcagagctcaaagctgttgaggagagaagcaattattcaagttactgtgtgtaacagagagaggaaccatttctactcactttccccctgactcccagtcccataaattctcactatggggaaacatggtagagtggtctctcattcaaagcacaggccatgtcctgtaagacaatcccattttttcagggtattgtttcccagttggtactttaatggagtcattgctgactcattctacctttcagttaggccagttgcttctgggtgatggggaagatagtaagattctataagattccatgggcaggagcccattgctgcacttccttcgctttcaaatgaaattttttttttttttttttttagagataaagtacttggtctgtcactcaggctggggtgcagtggcaccatcatagctcactgaagccttgatctcctgggccaaagtgatcctcttacctcagcttcttaagcaactggaactacaggtgggtcccagtatgcttggctaatttttttggtgttcttagtagagacagggtctcac[143 bp omitted]catgatggtgggtgagcatgctttgagtctgcagatggtagtgacagcaaacgcattaaaggcagggaagcacgttcgtgtctgggatatctgtctattccagtgaggacaaatctttgccctcttcatgacggaagaggtccaaggtaatcaacttgccaccgggtagcaggctgatccccagggaatggtgccatattggggctcagtgttggtctctgctattggcagattaggcgctcagcagtaacagtagccaggtcagccatggcaaggggaagctgacgttgctgaacccatgcatagcctccatctctgccaccatggccacttttttcatggacccattgagcaagcattagggtggctgggaaaagagcctgactctcatgc[141 bp omitted]aacacggtgaaaccctgtctctattaaaaatacaaaaaattagccgggcgtggtggtgggcgcctgtagtcccagctactcgggaggctgaggcaggagaatggcgtgaacccaggaggcagagcttgcagtgagccgagattgcgccactgcactccatccggcctgggtgacagagcaagactccgtcttaaaaaaaaaaaaaaaaaaaaaaaagaatttttcggctgggcatggtggctcacacctgtaatcccagcactttgggaggccgaggcaggtagatcatgaggtcaggagatggagactatcctggctaacacagtgaaaccccacctctactgaaaatacaaaaaattagctgggcgtggtggcgggcgcctgtagtcccacctactcaggaggctgaggcaggagaatggcgtgaaccctgggaggtggagcttgcagtgagccgagatggcgccactgcactccagcctgggcaacagagctagactccttctcaaa[131 bp omitted]gaaaccccgtctctactaaaaatacaaaaatttagccgggcatagtggcgggtgcctgtagtcccagctactcgggaggctgaggcaggagaatggcgtgaacccgggaggcggagcttgcagtgagccgagattgcaccactgcactccagcctgggtgacagagccagactctgtctcaaaaaaaaaaaaaaaaaaaaaaaaaaagaaaaatctgtggctgggtgcagtggctcacacctataatcccagcactttgggaggctgaggcaggtggattgcctgaagtcaggagttcaagaccagcctggccaacatggtgaaaccccgtctctactaaaaatacaaaaattagtcgggtgtggtggcgggtgcctgtaatcccagctacttgggaggttgaggcgggagaatcacttcaacccgggaggcagaggttgcagtgagccgagatcgtgccattgtactccaacctgggaaacagagcgagattccatctcaaaaaaaaaaaaaaaaaaaggaattttcacttcagtggctgcccttgggtgggcactcctatgggacacaaatatcttcacagtctgtgcagagactgagaggcccatccatatgcctctccaagcttccttgtcattaatctttcaatcttcttccttccacgtacttgaccatccacccaaaccattagcaactgcccataaattagtatagatctatacttctggccacttctccctccaggcatactggacaactaaatgtgcagcatgaaattctcttttttctttttgaaacagagtctcgctctgtcgcttaggcaggttgcggtggcacaatctcagctcgctgcaacctccacctcccaggttgaagcaattctcccgcctcagcctccgcagtagctgggactacaggtgtgtaccaccacacccgacctacatgaagttctgaccactgccctgtaggttcatccctaagggaggttgtaatgctgccattgtccactttcgagcggtaccagcatgatgtacagactagctgtaagccaggctcaagtttataattattttttttgaaacggagtctcgctttgttgccaggctggagtgcagtggtgcgatctcagctcactgcaccctccaccttctgggttcaagagattctcctgcctcagcctcccgagtagctggtactataggtgcctgccaccatgcccagctaatttttgtatttttagtagagacggggtttcaccatgttggccaggatggtctcaaactcctgacctcgtgatccacctgcctcagcctcccaaagtgttgagattacaggcgtgagccaccacgcccagccaagtttcttcctcatttcactgggcataaggaacatgccagaggaaaagtttggcttgaagtctaggaaccaatgcaacagaggttagtgttgaaggactctgaccttgttaatggtaaagcagcttcaaaagccggcacggtggctcaacgcctgtaatcccagcactttgggaggccgagatgggcagatcacgaggtcaggaaatcgagcccatcctggctaacacggtgaaaccccgtctctactaaaaatacaaaaaattagccgggcgtggtggtgggcacctgtagtcccagctactcgggaggctgaggcaggagaatggtgtgaacccgggaggcgcagcttgcagtgagccgagatcgcgccactgcactccagcctaggggacagagtgagactccgactcaaaaaaaaaaaaatttttggctgggtgtggtggctcactcctgtaatcccagcactttgggaggctgaggcgggcagatcacctgaggtcagcagttcaagaccagcctgaccaacatggtgaaaccccgtctctactaaaaataaaaaattagctgggtgtggtggcgcatgcctgtagtcccagctacttgggaagctgaggcaggagaatctcttgaaaccgggaagcggaggttgcagtgagctgatatcacaccactgcactccagcctgggaggttgcagtgagctgagatcgtgcccctgcactccagcctgggcgacagagtgagacttcgtctcaaaaaaaaaaattttaaaaaagagcagcttctactgcagcctcctcttaccctattgccttctcttgctctggtctccactcaaagcatgcagccttctgggtgattttgcagatgggtcaaaacagcatactcaatgttgcctcccaaataaaaaaacctaccgaccattgtacttctttctttgtggtaggtactgcaacttg[136 bp omitted]atggagaaaccccagtctctactaaaaatacaaaattagcaaggcgtggtggcgcatgcctggaatcccagctactcagccggctgaggcaggagaatcgcttgaacctgggaggtggaggttgcggtgagccgagatggtgccattgcattccagcctgggcaacaagagtgaaattccgtctcaaaaaaaaaagaagaagaaaagaaaaaatatctttctttcttgctgggtgtggtggctcatgcccgaaatcccagcactttgggatgcccaggcaggcggattgcctgagctcaggagttcgagaccagcctgggcaacaaagtgaaaccccttctctactaaaatacaaaaaattagctgggtgtgctgctgtgcgcctgtagtcccagctacttgggaggctgaggcagaattgcttgaaccccagagatggaggttgcagtaagccgagatcatgccactgcactctagcctgggtgacagagcgacactccatctccaaaaaaaaaaaaaaaaaaaaagtagaaaagatatctttatttccctccctccctcctttccctctttccttcctttttgagacagggtctcactttgtcacccagactgaagcgcagtgataaaatcacagctcagcagcttcaacatcctgggctcaagtgatcctccaatctcaacctcctgaatagctgggacaacagttgtggaccaccatgcccggctaattttatagagatgaggtcctactctattgtccaggctggtctctaactcctgggctcaaacaatcctcccgcctgagcctctgaagggctgagattataggcatgagccactgtgcctggcctgaagataattttagatccttatcagactggagatggtaccagaggaatctacattaacgagttttcttttttttttgttgagacagagtctcactccgttgcccaggctggagtgcagtggtgtaatctcggctcactgcaaccttcgcctcccgggttcaagcgattctcctccttcagcctcgtgagtagctgggattacaggcgccaccaccgtgctcagctttttttgttttgctttgttttttttgtatttttagtagggacgggtttcaccatg[134 bp omitted]ggcttctcacaagttactaccccttttcctttgttctataatttctctaaaaattttatgctttttgttgaagacgctgtataagctggaattcgaagccacctctttgagaactactcattccctgggtgtctcccatgtgtataagaaatatacatgttaataagcttctgtttgtttttctcttattatcttttgttacaggggtacattccaactaggaacttatgaggattaaagaaaaaatatttttcaggccaggcaccatggctcatgcctgtaatcccagcactttgggaggccgaggcaggtggattacctggggtcaggagttcaagaccagcctggataacatggcgaaatcccgtctctactaaaaatacaaaaattagctgggtgtggtggcatacacctgtagtcccactacttgggaggctgaggcaggagaatcacttgaacccaggagacggaggttgcagtgagccgagatcgcgccacttcactccagcctgggcaacagagtgagactctatctcaaaaaaaaaaaaaaaaaaaaagccaggcatggtggcttacacctgtaatcccagcactttgggaggccgaggcgggcatattacaagctcaggatttcgagacccgcctagccagcatggtgaaaccccatctctactaaaactacaaaaaattagatgggcatggtggcacgcgcctgtaatctgagctactcgggagactgaggcaggagacttgcttgaacccgggaggcagaggttgcagtgagccgagattgtgccactgtactccagcctgggcgacagagtgagactctgtctcaaaaatatatatatttttcttcccctgtaaccccccaaaacttcactgaggtgggagggggtcgctgaattttgatggtgactttctccaattttctcattcgtacataccttactaaagcatttaaagtacttgctatttgttgctcgtcaggaccaatcagcataatgtcattcttgtagcagaccgatgtgatggcttgtgaaatgtcaaaatgatcaagatttagtggacaatattggggcaaagagcaggagaactgctgtagcctggaaataccactctcaaggtatactgttgggtctgccaattaaaagcaaactgcttctggtggtccttgaaaattgatatggagaaaaaggcattaggcaggttaatagctgcataccaataccagattctgttgatttgttccagcaagcatattacatctggtacagcagctacaattagaataactatctgattatgtttacaatagcccacagtcattcctcaagttattcttttttgacacgcttatttatttatttattcattttttcaagacacggtcttgccctgccgtccaggctggagtgcagtggtgcaatcttggctcactgcaacctccacctcctgggttcaaatgacccttccacctcagcctcccgagtagctgggatcacaggcatgggccaccacacctggctaacttttgtatttttaaagagatgggatttcgccatgttgcccaggctgatctcgaactcttgagctaaagtgatctgcctacctcagcctcccaaagtgctgggattacaggagagagccaccttgcctggccgtgatgcttattattttaaaccactgttttgggtggcggtgtttttgagacagagtttcgctcttgttgcccaggctggagcgcagtggtgcgatctcagctcactgcaacatccacctcctggattcaagtgattctcctgcctcaggcctctccagtagctgggattacaggtgcctgccaccacgcccggctaattttttgtatttctaatagagacagggtttcctcatgttggccagattggtctcgaactccagacctcgggtgatccacctgcctcggcctcccacagtgcggggattacaggcgtgagccaccgtgccaggcctgtttttgtttgttttttgaaacagtttcattctgtctcccaggcttgagtgcagtggtgcggtcttggctcactgcaacctccacctcccaggttcaagcaattctcctgcctcagcctcccgagcagctgggattacaggcatgtgccaccatgcccagctaatttttgtatttttaatagagatggggtttcactatgttggccatgctagtctcaaattcctggcctccagtgatccaccggccttggcctcccaaagtgctgggaattacaggggtgaggcaccgcacctggccttgggtgttttttaatataacaaaagctaattgacatagggacatgcatttctgcttcaccaaagtccccaccaacccctattgtcttccatctatttcacttactcctatttctggcatggtccttgtaggcatttgagtttgccactcatggatagggcctggcatggcaaactgcctggaccttccgcactgctccctaccatcaccctccaatcccagttcctgggagggaatcccgggtctcattccacccatttctcctccccagcaccttccccagttcctgcccaccatcatcttctcgcttctggctcactgcacccatctcttctctgttctccgtgtatacagctgtaatcattatctagttaattgctccgactctgagagagtaataaaatttctcttatctcaacacaaagtctttggttacagcctggacaagtttcctggattaagctccaaggtgccaggaagtctggaacaatatctccatatcaaaaacaatgaagcagctggcacaggggctcacgcctgtaatcccagcctgggcgacagagcgagtccttgtctctaaacaaaacaaaacaaaaactgctgctgccatagcacaggtctcatttaggaatggttttgtcaacttgcgggacaaatgagctcaaactcagtataaatggccagctgggggatgccatctctgctgctctgtatcggtttacatgaggacttagctgctagaa[134 bp omitted]caacatggtgaaatctcgtctctactaaaaatacaaaaatattagccgggcatggtggcgggtgcctataaccctagctactcaggaggctgaggcaggagaattgcttgaacctgggaggtggtggttgcagtgaggtgagatcgagccactgcactccagcctgggcaagactccgtctcaaaataaataaataaataaataaataaaaacagaatttacataccaacggatctcaatataggggtcttatttggatcttgatataaacaaatattttaaaatttatgacttttttttttttttttttttttagacaaggtctcactccagcctgggtgaggtgacagagtgaaactatgtctcaaaaaaaaaaaaaaaaaagagtccttatatcttagaaacacataaacacatactcattttttttttttggtggcatggtgtgatgtatagtgtattagctatctattgctaagtaacaaattttacccccaaatgtagcagttcagttgactttctcttgagagggagtctcattctgtcgcccaggctggagtgcagtggcacgatcttggctcactgcaacctccgcctcccggattcaagcgattctcctgcttcagactcccgactagctgggattacaggcgcccgccaccacgccctgctaatttttgtatttttagtagagatgggatttcgccatgttggccaggctggtctcgaactcctaaattcaggtgatccgccagcctcaccttctcaaagtgctgtgattacaggcatgagccacggtgcccggccacgcagttcagaacaatacttatttattatctcagtttctgcgagtgtagaatgtgtggatggttcagccctgccacaatcacacagcgggtgggaagaccacaggagttgcgggttgtaggtgggaaggggacctgccctcgggcggactttggtgccgctctgctgccatcttgtggcgggcacagaaacaactgccctttccacctggtccttcccatactctaaccattcttggtattttagaacttgctattcaaaatttttagtttttattctcccagttgctgaacagatgataaagtcacatggtttaaaattcatgaggataaacagggtcttcctctccctggggactctaggtttctttccaggggaactattctatgttatttctttttttcttttctttttttctttttctttttcttttttgagatggagtctcgctctgttgcccaggctggagtgcagtggtgcgaactcggctcactgcaacctccgcctcctgggttgaagcgattcttctgcctcagcctcctgagcagctgggattacaggcgtgcaccaccacacccggctttttttttttttttttttttgtatttttagtagagaaggaagttttaccatgttagtcaggctggtctcaaactcctgaccgcaggttatccgcccgcctcggccttccaaagtgctgggattacaggcatgagccaccgcgcccagccacttacttgtttcttgtgtatctttctgggaaaagttcatgtatatacaaaagcaaacaacacacacatacacgaccaacaacaacaagagcaccccccaaaacatgcccagcctttcccagtaataaaaggataatttgttcctggccaggtgtggtggctcacacctgaaatcccaacattttgggaggctgagacaagaggaccactgaagcccaggaattggagaccagcctaggaaacacagtgagatcccttctcaacaaaaataaaaataaaaaaattagctgggcgtggtggcccatgcctgtggtcccagctactgggaaaggctgaggtgagggaatcacttgggcctgagaggcagaggttgcagtgagccaggattgcaccactgcactccaccctgggtgacagaatgtgaccctgtctcaaaaataaaaaataaggccgggtgcggtggctcacgcctgtactcccagcactttgggaggccgaggcaggcggatcacgaggtcaagagatcgagaccatcctggctaatgcggtgaaaccctgtctctactaaaaatacaaaaaattagccaggcatggtggcgggtgcctgtagtcccagctacttggggggctgaggcaggagaatggcgtgaacccgggaggcggagcttgcagtgagccgagattgcgccactgcacttgggcctgggtgaaagagccagactccatctcaaaataaataaataaataataaaaaataaaaaaaggttagttattatgatcctgccagcatctcagctacatgaatgcgtggagtttttcagtattgttccctgctgatctccagtgtctggaacagtgcctgacacacagtaggtgctcaggaaatatatttcagttcgtaatgatgggaaatgtcaaacacacaaaaacacagcaagtagaataatgaaccccctgtacctatcaccgagcctcagcaaacttgcctcatctataccccacccaccttttcccctcaatggatttttaaatcaaagccaaggcatcatcatatcctttcatccatgaatacttcaaattctatctctaagagacaactccatatcacacctaaacaattaacatgaattccttaatacaactaaatatccagtcagggttcaatacccatttttttccattgggtcatataatattttttgtttgttcaaaacataaatatattatttgattacttgttcaaatcagtatcaataaatactgttccaggcatagtggcacatcacgatagtcccagccactcaggaggctgaggcaggaggacttcttttttttttgagacagggttttgctctgttccccaggctggagttcagtggtgtgatcatagctcactgtagccttgatgtccaggctcaagtgatcttcccacctcggcctccctagtaacttggaccacaggtgcacatcaccatacctagctaatttttttatttttatttttgtagagatgggggtctcactatgttgcccaagctggtcttaaactcccaggctccagtgatcctcctgtctcggcctcccgaagtgctgagattacaggcgtgagccactgtgcctggtcaaatgtgactactacttttttttttttttttttttttagacagtctcactccattacccaggctggagcacagtgtttcgatcttggctcactgcaatctctgcctcctgggtcaagcaattcttgtgctttagcatcctgagtagctggaattacaggtgtgtgtcaccacactcggctaatttttggatttttagtagagacagggtttcgccatgttggctggctggtctcgaactcctgacctcaggtgatctgcctggctcagcctcccaaagtgctgggattagtggtgtgagccaccgcatctggcccaaatgcgatttcttgaagctctcccttacctcaaagaacagagtctggctcttccattctgacagtaagcacaggtctatcattgccttcagttgccttcaggaccactggggtctgttgcagtcactttaggggattgagtctttggccacctctcagagtccttgaacagtctcagccagctgcttaggttgaatgatcaaagcagcaagtcctggcttcactgaaccaaaaatgtcccttccagaattggaagctgttctggtgttttctgcacaaaagtgtaaacatagattcaagttccagtgctttctgcatccaacagaattccatagaaggccctggctctgacctcgatggaatgcatggaagacaggaagatactcttaaacccagcctgctgcaaacacaggttacttccagcacgaaaaagttacacccgaggaggtggccattctcttctcaagaggtggtgagtctaggcccttcttgcagaagcagagctgcacatacacatctttttttttttttttttttttaagacacggtcttggtctgttgcccaggctggagtgcagtggtgcaatctcagccttctggtttcaagcagtcctcccgcctcagcctcctgagtagctgggactacgggtgcatgccagcacgtctggctaatttttgtattttttgtagagatgaggttttgccgtgttgcgtatgctggtcttgaactcctgggctcaagctatctgcctgcctcagcctcccaaagtgctgggattacagacgtaagccatcatgcccggccaaattccttatccttatctctttctctctctttttctttttctttttttcttttttgtttgttaagacagggtttcactctgttgcccaggttggagtacaagaggcaggatcacagctcacagcagcttcgaactcctgggctcaagtgatcctccctcctcagcatcctgagtagctgggactataggtgtgccactacacctggccaatttttaaattttttggagatagtgtcttgctgtgttgcccaggttggttttaactcctggcctcaagcgatcctttcactggcccctcccaaagtgttgggattataggaatgagacactgcacctgacctccttattattctctttttttttagacggagtctcgctctgtcacccaggctggagtgcagtgctgcgatctcggctcactgtaacctctgcctcccaggttcaagcgattctcttgtctcagcctcccgagaagctaggattacaggtgcacgccaccacgcctggctaattttgaatttttagtagagacagggttttaccatgttggccaggctgatcttgaactcctgacctcaggtgatctgcccaccttggcctcccaaagtgctgggattacaggtgtgagtcaccgcacccggccccttctcttttaaagtagaaaaaaaaaagccacccaccagagacataaatggcaatgcatgcatcaggcatggtgctaggaactttatacacatgtaatcctttcaaaaatagctcttttaagtaagaaaaatatgacccctccccatattaaatgaacaagggatatgaacatacaagtaatttattcaattaacaaatatttattgagcacctactatattttaggcactgtgctaaaatcaattccaatggtcaacaaatatgtgaacaaatggtaatcattattgaaggaatgcaaatgtacaaaaagtgacttttccatttttcacctattcaatggtctatattcaaaataaatgattctccaggattggatgagcgtggctttgggatctcttctactgtaggtagatgtacagctgcataatcttcctgaaggcacttgagcaatgtctatagaatggcttaaaatgcatacatatcttaaaaatggccaaccaggagcaggaagcactcctaacaacctgattgtggtttccaaatgccatttgggaaagtaccaaaatacctaaaggaaagaagagggctccttggaaaatggcgacttaaaggtgagagacaggaaatgaacaagatgaacttggaacatcttgtggtggcagacggggcaaataatcaaagaggactgggtcatagcaaaaggacacaggagccaactggaagaggctcttccacacccaacatggaggcatttgagcatcactgagggtgcaatttaaatggattgaaacacattaaacatcacacacacacacacacacacacacacacacacacacacacacacctgcatctaaatgcatcagctaccatggcagaatgctgggggagccaattcattattattatttctgagacagtttcgctcttgtcacccaggctggagcgcagtggcgcgatctcggctcactgcaacctccgcctcctgggttcaggcaattctcctgcctcagcctcccaagtagctaggattacaggcacgcgccaccacgcctggctaatttttgtatttttactagagatagtatttcaccattttggccaggctggtctcgaactcctgacctcaagtaatctgcctgcctcggcctctcaaagtgctgagattacaggcatgagccaccctgcctgacctcaactcattattatgaaaaccagtaaagagaaagaagcatttatcctgcaattcttttcttttcctttttcctttttttttttttttttttttttgagacggagtctcactctgtcgcccaggctggagtgcagtggtgcgatttcggctcactgcaacctccgcctcccaggttcaagtaattctcctgactcagcctcctgagtagctgggactacaggcacacaccgccaagcctggctaagtttttgtattttagttgagatggccgtgttgcccaggctggtcttaaactcctgagctcacgcaatccacccgccttggcctccctaagtgctaggattacaggggtgagccaaaacacccagcctcctgtgtttctttactatatcattgggtactaaatagtagctgaaggaaagttttttctttttttcttttttttttttttttgagatggagtttcactcttgttgcccaggctagagtgcaatggcacgatcttggctcactgcaacctctgcctcccaggttcaagcgattctcctgcctcagcctcccaagtagctgggattacaggcatgtgccaccatgcccagctaattttgtatttttagtagagatggggtttcaccatgttgatcaggctggtctcgaactcctgacctaaagtgatccacctgcctcagcctcccaaagtgctgggatcacaggtgtgagccaccacaccaggccagaaagtttttcttcataagaatattctagctaataaggaatgaataataagatatcgccattttgcaacctctaatgaacagatttatgaatgaaacatcaatggttgccaacatcacaaaaagagcaacacctaaatattatggcttccaatattaaccactgataaataatcttaacaaaaaaagaacctcaatttgaccagtcctctcaatctcaactaatttacaggaaatactagggatagaggagcatgttaaactacaccatgcagatgcagccggcaaaaactagacttggagaaggcaagtctacaaggcaaattatctagtttcttcaaaaaacaagaagttgcaaaaaaaaagccagtaaaggagaatagattgagaataatagagaaatacaagacatatcaactgcaatttgaggacatcatttggatcctgggaattttttataaaactgacatttatgaaacaaaaatttgaacactatcatacatgtaatggcattaaggtggtaacatcttttttttcttttgagacgcagtttcactcttgtcgcccaggctggagtgcaatggcgcaatctcagctcacagcaacctctgccttctgtgttcaagggattctcctgcctcggcctcccaggtagctgggattacaggtgcccaccaccatggctggctaatttttgtatttttagtagagttggggtttcacgttggccaggctggtctcgagctcctgccctcagatgatccatccacctcggcctcccaaagtgctgggattacaggcatgagctactgcaccaggcctgtttttttttttttttaaggagtgaaaatattttctaatgttgtcatgtgctttaaagatatgtatgaaatgtctgtggatgaaataatatatctggtatttacttcaaaaataacagagatgagagaagtgggtacacagacaaagcaagattggccatgagctgataattcttgaagctggtgatgaggccgctggagttcaatataagattctgtgtatttttgtatatgttcaaattttttcatgatagaaagttttaaaaagttactttttttttgagacggaatcgcgctctgttgctaattttttgtatttttagtagagatgaggtttcaccatgttggccaggatggtctttatctcttgacctcgtgatccccctgcctcagcctcccaaagtgctgggattagggattacaggtgtgagccgctgcgcccagccaaaaatttacatttttatctagcatttccacttctaggaatttaccttaaagatatattacacatgtacaaaataatttacgtgcaagggaaatattatgggattgtttgaaagaacaaaaaataatggaaagtccaggcacggtggctcatgcctgtaatcccagcacttttgagaggccaaggtgggtgggtcacttgaggtcaggagtttgagaccagcctggccaacatggtgaaaccctgtagctactaaaaatacaaaaattagccgggcgtggtagcaggtgcctgtaattccagctactcaggaggctgaggcagcagaatttcttgaatccaggaggcagaagttgcagtgagccaaggtcatgccactgcactccagcatgggcaacagagcgagactctgtctcaaaaacaaaacaaaaaaatggccgtgtgaggtggctcacgcctgtaatctcagcactttgggaggccgaggtgggcggattacctgaggtcaggagtttgagaccagcctggccaacatggtgaaaccctgtctctactaaaaagacaaaaattagctgggcgtcgtggcacacacctgtagtcccagctacttgggaggctgaggcaggacaatcgcttgaacctgggaggtggaggttgcagtaagctgagatcacaacactgcactccaacctgggtgacagagcgagactccgtctcaaaaaaaaattgataatgttaaataaattatgaaacacacagatgatggaatcctcaggagttgttaaaaaaaaataaggcagctatatatgtaccaatatggtctaatcttcaagatgtatgcataagcaaaaataccaatgtgttgaaatttgctatcacttgtgtaaaatatttttataaagagtacattatgcttatgcaaatattaataattattattcagatggagtctccactctgtcacccagactggagtgcagtggcaggatatcggctcactgcagcctctgcctcctgggttcaagtgattcttgtgcctcagcctccaagtagctaggactacagacatgagccaccacacccggctaatttttgtattttttagttgagacaaggtttcaccatgttggccaggctggtctccctgacctcacgtgatctgttttccctggcctcccaaagtgctgggattacatgcttatgcaaattaaaaatcaccaactatatacaagaacttggtgttagtgattgttccataaaaggtaatgtatgcaaattaaaaatcaccaactatatacaagaacttggtgttagtgattgttccataaaaggtaatggggtgggaaaggcatagagctattttatgaagattcacttatgtctgcataccatgttgtaactttaggccaggaagtggctcacaccttaatcccagcactttgggaggctgaggtgggcagatcacttgaggtcaaggagtttgagaccagtgtgggcaacatggtgaaaccccggctctactaaaaatacaaaaattagctgggcgtgatggtgggcgtctgtaatcccagctactcgggaggctgaggcaggagaatcacttgaatccgggaggcggaggttgcagtgagctgagatcaaaccactgtactccagcctgggtgagactcggtctcaaaaaacaaacaaaacaaaaaaacccaacaacaacaaattgtaactttaacaattttatcctatgactgtgctttaactattcagagtgacaaattttttttttttgagacagggtctcactctgtcgcccagactgttgtgcagtggcacgatcccggctcactgtggcctccgcctcccaggttccagtgattctcctgtctgagcctcccaggtagctgggattacagacacgcactaccatggctagctaatttttgtatttttagtagagacggggtttcaccatgttggccaggctggtctcgaacttctaacctcaggtgatctgcccacctcggcctcccaaagtgctaggattacaggaatcctacgaatcaattttgatatttttataaaaatccattctctccagattttaaaacagaaaaaagtcatgcatagtaagctatttttaaaaaatctttaccccctttctcattcataatattttttccttagatcacacttgtaaatagtcttattgtattgttaaacaaacaaccttcagatgaaatctgtttttccattctgttttcatttttaataattaatcttactgctgactttggtttatattgtaattttttcctaactttgagagttgactactcattcattcaacatgtttagtatgtgactggcagtgatgaggtgctggggatctacacatggagcacaaagccactagcttcaattctcaggttctgatgggagtacagctttggctatgctaaactagttctttttttttttttttttcttttttgagacagggtctgcacccaggctggagtgcagtggcacaatctcagctcactgcaacctccgcctcccatgctcaagcaattctcctgcctcagcctcctgagtagctgggattacaggcatgcaccactccacctggctaatttttgtattttagtagagacggggtttcaccatgttggccaggctggtctcaaactcctgacctgaagtgatccgcctgcctcggcctcccaaagtgctgggattacaggtgtgagccaccttacccggccactcttctgttaatttctaatcttctgaatttctaaccttttgattgaaggcctcataataattatgctttcccactatttttcagaataaatgatcataacaactggttatgaagacttttggatatgtgatgtattcataaggctctcctctcacatgaactccttatcagtgatactaataataaaattaatgacaatagctagtatttactgagcacttgtgtgtgataggtattacttctaaggctttacataaaatacctcatttagtcctcataaaagttctattagttagacataataatcaccacttaaaaataagtaaactgggttgggcatggtggctcacgccggtaatcccagcactctgggaggccgatgtgggcagatcacgaggtcagatcaagaccatcctggccaacatggtgaaaccccgtctctactaaaaatacaaaaattagctaggcatggcggcatgtgcctgtaatcccagctactcaggaggctgaggcagaagaatcccttgaacctggaaggcggaggttgcagtgagctgagatcgcaccactgcactccagcctggtgacggagctagactttgtctcaaaaaaaaaaagtaaactgagggacagagagtttgcataacttgcccaatgctatgtagtctataatcgggggaagtgagcactgctaagtaaagtatacgccatgatgaaaggcacagtcatagaatcttttttttttttttttctgagatggagtcttgctctgtcgccgaggctggagtgcagtggtgcgatcttggctcactgcaagctccgcctcctgggttcacgccattctcctgcctcagcctcccgagtagctgagactacaggtgcccgccactaggcccagctaattttttcatagtttttagttgagacaggtttcactgtgttagccaggatggtctcgatctcctgaccttgtgatccgcccgcctcggcctcccagagtgctgggattacaggcgtgagccactatgcccagccagaacctttttttttttttttttttttgagacagagttttgtccttgtcaacgaggctggaatgcaatggtgggatctcggcttgctgcaacctctgcctcctggggtcaaacggttttcctgcctcagcctcctgagtagctgggattacaggcacccgccaccatgcctggctaatttttgtatttttagtagtgatggggtttcgccacattggccaggctggtctcaaactcctgacctcaaatgatctgccggccttggcctcccaaagtgctgggattacaggcatgagccaccacgcctggccacagaatcttttaatcgggtcatttttgtattaggaattgtcagaaatttaacatattttgaatggcaagaagcagcttttctatattcatttttttttagcatagattatctgatgcttaggaaacagtgagtgaggcaaaaagaattcccacatttatttaattttctttgggtgtgagttttctgatgttctatgatggaagtgacaggtgttttctgacattaattacactacattaaaaattacctagtactgagccagatgtgaactccacataaaggcttatctttatcccttacactcaaggctttctaaccagtatgaattctgtagtgttcaatgagttgtgagccaagaataaatgcctgcccacactctctacattcgtaaggtttgataccaggatgaattctctgatgttcggtaagttgtgaactacgaataaaggccattccacactccctgcattcatagggtttctcacaagtgtgaattcgctgatgatgagtcagttgtgaaacacgaataaaggccttcccacattccttacattcgtagggtttgtcacctgtatgaattctttgatgttgaatgaggtatgagctacgactaaatgccttcccgcagtccttacattcatagggtctgtcgccagtatggactctctgatgtcgtgtgagctgtgcgtgctgtctgaaggccttcccacattccttacactcatagggtttctccccagaatgaattctttgatgtcgagtaacttctgagctgtgaataaagccctttccgcattccttacactcgtagggtttctcaccagtgtggattcgctggtgtacagtcagctgtgagtgctgtctaaaggctttcccgcattctttacactcatagggtctggcccctgtgtggattctccgatgcacagtgagttgggagccacgaatgaaagccttgccacagtctttacatacgtagggtttctcgcctgtgtgagttctttgatgcagaatcagctgtgaatgctgcctaaaggtcttcccacattctttacattcataaggtttgacaccagtatgaagtctctgatgtagaataagttctgatgtacgaccaaaggccttcccacagtccttacagtcataaggtttctcacccgtgtgaattctctgatgctgaacaaggtgtgaggcacggctgaaggccttcccacattccttacatccaaagggtttttcaccagtgtgaattttctgatgttgaataaggtgtgagccacggctaaatgctttcccacattcatgacattccatcagtttctcaccagtctccctgctctgacgtacagtgtgagacgtgtgatgctggaacacgggcatatgtccataggtgacgttcacttgcttaaaatagcactcttcattgacttgtctctcaaactggccttcgcattcccagtcagctctaaaatcggagccctccaggtcactgcatttaaggctttccattatctcccagttgaatgccccgatttcaaaaatgtctttttgtagaaatttctcacacctggactccaagtctgaaaaataagaaaaagataaatacaagctgtgatccttctctatgagaaataaaaaattctatagtagaggccaggcacggtggctcacatctgtaatcccagcactttgggaggctgaggcgggtggatcacaaggtcgggagttcacctggccaagatggtgaaaccctgtctctattaaaaatacaaaaattagccacacttggtggcaggcacctgtaatcccagctactagggaggttgaggcaggagaatcgcttgaacctgggaggcagaggtcgcagtgagccgagattgcgccactgcactccagcctgggcgacagagcaagactctgtctcataaaaaaaaaaaaaaaaaaaaaaaactatagtagaacagggagacaaaaataaataaccataaaaagtgaatgccttatatacatctcaaatattatgcaatttcaaaaaagcagatgaaagcacaccatgtgaagagctcacatggtgccagaagggagcaagaagacaaattaagccaggggttctaaatttgttttttgctttgagacggagtcttgctctgtcgcccaggctggaatgcagtggtacaatcttggctcacgcaacctccgcctcttgggttcaagtgattctcctgcctcagcctcccgagtagctgggattacaggcactgctaccacacccagctaatttttgtatttttagtaaagatggggtttcaccata[137 bp omitted]attaagcagtcactccccattccctattccctccagcccctggcaaccattactggcacagagctactaattctgtctctataaatttgcctattctggacatttcatgtaaataaggcatctatattttcaacacttcccaccacataaagttgatgtccatcaaaatgaaaatctctgcttaaacatttcactgccttcccatttcggtgcattaagaattaattccaaaggccaggcgaggtggcttatgccttaatcccagcactttgggagtccaaggcaaatggatcgcttgaggtcaggagttcaagaccagcctggccaacatggagaaaccctgtctctactaaaaaatacaaaaattagcaggcatggtggcaggcgcctataatcccagctgcttgggagaccgagacacaagaatcacttgaacctaggaggcagaggttgcagtgagccaagatggcactactgcactccagcctggaagacagagtgagagtccatctcagaaaaaaaaaaaagggctgggtgcagtggctcatgtctgtaatcacagcactttgggagactgaggtgggtggatcacctgaggtcgggtgttcgagatcagcctgaccaacatgaagaaaccctgtctctactaaaaatacaaaattagccggccgtggtggcacatgcctgtaatcctaactacctgggaggctgaggcaggagaatcacttgaatccgggaggcagaggttgtggtgagctgagatcgcaccactgcactccagcctgggtgacagagcgaaactctgtctcaaaaaaaaaaaaaaaaaagaattacaaactcactgccatggctcacagggctcttggcaaagcagatccctgcttgtttttgtcaccactgtgtctcagcaagagcagggcctcttcacattgaacattctcccctttcctcccagtgtacaaaaccaccagccatctatgagcatgtaaaataaatctaggccttttccatctcagatctctcatcaggttcttccatctatcaagaatcctgtcctgggctttttgctgcttttctcatccttaaggtctcagatgaaaactcactctctattttttttttttttttttgagacagagtcttactctgtcccccaggcgctcactgcaacctctgcctcccaggttcaagtgattctcctgcctcagcctcccgagtagctgggattataggtgcctgccaccatgcctgggtaatttttgcttttttagtagagatggagtttcaccatgttggccaggctggtctcaaactcctgacctcaggtaatccgcccacctcggcctctcaaagtgctgggattacgggcgtttgccactgtgcctggcttgtcttttttttttaatatttgacatggggtcttgctctgtctcccaggctggagtacagtggtgcgatctcagctcaccacaacctctgcctctggggttcaagcgattctcctgcctcagcctcccgagtagctgagattacaggcatgtgctgccacgcccggccaatttttgtatttttattagagacaaggtttcaccatgttagctaggctggtctcctgaactcctgacgtcacgtgatccagccgccttggcttctaaaagtattgggattacaggcgtcagccaccatgcccggcaaaaactcacactttcaagaaagctctcagcctgacagccctaaacacacgcctttatcctttctcccatttcttgtactctgtaacacttttgttgtaattagattttcatttacatattcatctgctgttctgtttgttttcttgttcctgaatcttccccaaagatggaaatactgcctttttcactaaccattgaaaccaacccagctgggcgtggtggctcatgcctgtaatcccagcactttaggaggctgaggcaggtgggtcacttgagctcaggagttcgaaaccagactgggcaacatggtgcaaccccatctctaccaaaaacacaaaaaattagctgggcatggtggcaggcacctgtgtttccaggtattcagaaggctgaggtgggaggatggcttgagcccagggacagaggttcagtgagccgagaatagtgccactgcactccagcctgggcaacagagcaagaacttgtttaaaaaaaaaagacaagacggcatttgtcagattggataaaataccaaaatctaggtgcacagtagtaacaagtaacacactttaagacatgaagacctaaggtgtttgaaaataaaaggtgtggccgggtgcggtgactcatgcctgcaaccccagcactttgggaggctgagatgggtggatcacctgaggttgggagtttgagatcagcctgaccaacatggagaaaccctgtctctattaaaaatacaaaattatctgggcatggtggcacatgcctgtaattccagctactcgggaggctgaggcaagagaattgcttgaacccagggggcggaggttgcggtgagccaatatcgtgctattacactccggcctgggaaacaggagcgaaactccatctcaaaaaaaaaaaaatagactttaaaaacagaaatcatcattttgggttaagcagggtagctctataatcaagaaagtaattccattcagcaggaagatttatgtttctaaagttatatacacctaatagcctcctaatatatatatttatttttatttattttttgagacagagtctcttttttttttctgagacggagtctcgctctgtcgcccaggctggagtgcagtggcgcgatctcggctcattgcaagctctgcctcccggattcacgccattctcctgcctcagcttcccgagtagctgggaccacaggcgcccgtcaccacgcctggctaattttttgtatttttggtagagatggggtttcactgaccaggatggtctcgatctcctgaccttgtgctccgcccacctcggcctcccaaagtgctgggattacaggcatgagccatggtgcccggccgagacagagtcttgctctgtcgcctaggctggagtgcagtggcataatcttggctcactgcaacctctggctcccaggttcaagtgattctcctgcctcagcctcccgagtagctggggctacagccgtgtgccaccacgcctggctgattttttgtatcttttagtagagaaggggtttcactg[140 bp omitted]agaaattaacaaaatcgtcatcttggagatttcaattcacctttctcagaaatag[133 bp omitted]acacggtgaaacccgtctctactaaaaatacaaaaaattagcctggcatggtgttgtgcacctgtagtcccagctactcaggaggctgagacaggagaatcacttgaacctgggaggcggaggttgcagtgagccaagatcccgccactgcactccagcctgggcgacaaagtgagactcaagggcttcaaggaaaaataaaagagagagagaaaaaaaaattaaaaacaaaaaacaaacaactccaagaacagatgagggggccgcatgtggtaggtcatgcctgtaaccccagcactttgggaggctgaggcgtgcaggtcagttgaggtcaggagttcgagaccagcctggccaatgtggcgaaaccccgtctctactaaaaatgctaaaatcagccaggcatggtggcgggtgcctgtagtcccagctactcaagaggctgaggcaggagaatctcttgcatctgggaggtggaggttgcagtgagctgagatcatgccactacattccagcctgggcaacagagtgagactccgtctcaaaaaaaaaaaaaaacaaaacaacaacaacaacaaaaaacagatgagtgaataaacaaagtgtgtatataatatgtacacatgtatattagtatttatacatgtatacatctacatacacacatacaatggaatattattcagccataaaaagaataaaattcagagacattctacaacttggataaaacattatccttagtgaaataagccagatacaaaaggccacatactggatgatttacatgagatacctagaataggcaaattcatacagacaaaaagtagaacagaggtgaccagggactggaggaaggaaaatagagttattgtttaatgggtacagagtttctgtttgggatgatgcataagctctggaagcagagtgtataatgctgtgaatgaactaaatgccactgaattatctacttagccaggcatggtggcatgtgcctgtagcaccagccacttgggaacctgaggtgggaggatggcttgaaactgggaggcagaggttgcagtgagccgagatcgtgctactacactccagcctgggcaacagagccagaacctgtctcacaaaaataaataaataaatattatgtaattttttttttttttgagacagagtctcgctctgtcgcccaggctgggagcgcagtggtgtgatcttggctcactgcaacctccgcctcccgggttcaaacaattttcctgcctcagcctcccaagtagctgggattacaggcatgtgccaccatgcccggctaattttttttttttgtacttttcatagagatggggtttcac[131 bp omitted]ttaaaaatctaataaataaaagattattatttttcagaactgcaagaaattagaaaacacaccaaccaaatattctgtgaaagacaagaacacttttatggaatcaacagcaataggcttaatattttaatacggaattacagtagagtcgtacccataaagttgtttttgttttattttgttttgttttgtttttgagatggagtcttgttctgttgccaaggctggaataaagatgcgcgatcgatcttggttccttgcaacctccgcctcccgggttcaagcgattctcttgtctcagcctcccgagtagctgggattacaggcacctgccaccacacatggctaatttttgtatttttagtagagatggggtttcaccatgttggccagactggtttcgaactcctgacctcaagtgatccacctactggtctcccaaagtgctgggattacaggtgtgtgccaccgcgcccgtccatacattgttaatttatgcatattcaattaactttgctaaaaaaaatacatacagaatgtggtaggtgggataacggcactcaaagatgtctgtgtctttattcctggaacctatgaatgttgtcacacagcaaggggagttggaattcagattgctaatcagggcagggcacagtggctcacgcctgtaatcccagcactttgtgaggccgaggagggtggatcacctgaggtcgggagtttgagaccagtctgaccaacatggagaaaccccgcctctactaaaaatacaaaattagccgggcgtggtggtgggcgcctgtaatcccagctactcgggaggctgaggcaggagaatcacttgaaccagggaggcggaagttgcgatgagcggagatctcgccattgcactccagtctggacaacaagggcgaaactccatctcaaaaaaaaaaaattaaaaaaaaaaaaaggctaatcagttgaccaccacaagatggcgagattatcccagtttatctgggtggacacaatgtattcacaagggtccttggaagtgaaagtgggaaggccaggtgcggtggctcatgcctgtaatcccagcactttgggagttttgggaggcctaggtgggtggatcacttgaggtcaggagtttgagaccagcctggccaacatggcgaaatcctgtctctactaaaaatacaaaaattagctgggcgtggtggcgcactcctgtattcccaactacttgggaagctgaggcaggagaattgcttgaacctgggaggctgaggttgcaatgagctgagatcgtgccactgcactccagcctgggtgacagagtgagactctgtctcaaaaaaaaaaaaaaaaaaacacataaaaacaaactttttctgtgaagggcccaatggtaaatgttttagggtttgttgaacacataaagtctctacagcatattctttttttttttttaacactttcaaaatatcaaaactgttcttggctctagggctgtatgaaaaactggttatggactgcatttgacccacagattgcagtttgccgacccctggtctagggcacagggaagtaaaagatggtatggtaaagatgttaaggtcttgctttgctcagaaaaagttcaaagatatgatcgatttcctaccatttttctttcttttttttttttttttttcccgagatggagtctcactcctgttgcccaggctggagtgcagtggggcaatctcggctctcagctacctctgcctcctgaaccatttttcaataaaaggaaccagcattcttttgagaactggctgatttcagggctgaggcaggaaaaatctgaaataaccatggaacatgctgtggtaccagaaaatgtggaagtatataaaagagaatgtgggtgtgttgagagaacccaggagccaagcttaacgagttttcaagggccaaagcctgaacgattcgagcaatgaaataaacaatgaaagtagtgactacagcccatagaataaaataaatacccacgaactcatcgtgatataaagaaatcattgaatgaacaagtgaatggaagagggctagggacagttcttccttattgaagaattccaattaataaatggtgaaggaataagggacacagaaaatcaacattagacaagtgacagagtaataactggtgcagacaaggtccagtgatggatgccaaaatcggagtgggaggaggaaaagcagcacatttgcctagtgtgaaagtatttcgccataagatatttatcaattacggatggaaacttcacaggggagaaacaagacaggccctatcttaccaagtgatcaaactgaacagcacctatcttttttttttttttttctgttgcccaggctggagtgcagtggcgtgatcttggctccctgcaacctccgcctcccgggttcaagcgattctcctgtctcagcctcctgagtagctgggactacaggcacccgccaccacgcccagctaatttttatattttcagtagagacggggtttcaccatattggccaggctggtctcgaactgctgaccttgtgattcgcccgccttggcctcccaaagtgtgaacagcacctatcttaccaagtgatcaaactgaacagcaccagtaataagccatgttgatgtctgatatgtgatatacagagaagaacataacatcacttctgtgatattcttgctaaaatgcagaatctcactgtgagaaaacattagacaaacgtaaagtgagagacaatctacaaaaaaatactcattaagaggatcagctggctgggtgcagtggctcatgcctgtaatcccagcactttggaaggttgaggtgggcaggtcacttgagctcaggagtttgagaccagcctggccaacatagtgaaaccctgtatctactgaaaatacaaaaattatccaggtgtggtagcgtgcacctgtaatcctagctactcaggaggctgagacaggagaattacttgaatctgggaggcggaggttttagtagagatggggttttaccatgttggccaggctggtcttgaactcctggcttcaagtgatcttcccaccttggcctcccaaagtgctgagattacaggcatgggccactgtgcccagccaataaaatggttttttttttggtttgttttttgagatagacgttcacttttgtcgctcaggctggagtgcaatggcatgatctcggtttactgcaatctccacctcatgggttcaagagattctcctgcctcagcctcccgagtggctggaattacaggcacccacaaccatgctcagctaagttttttgtttgtttgtttgtttgttttttgagatggagtctcgctctgtcgcccaggctggagtgcagtggtgtgatcttggctcactgcaagctctgcctcctgggttcacgccattctcctgcctcagcctcctgagtagctgggactataggcgtctgccaccgcacccagctaattttttgtatttttagtagagacagggtttcaccatggtctcgatctcctgacctcgtgatccgcccgcctcagcctcccaaagtgcagggattacaggtgtgagccaccacgtctggccaatttttgtatttttagtagagacggggcttcaccgtgttggccagggtggtcttgaactcctgacctcaggtgatccacccacctcagcctgccaaagtgctgggattacaggcatgagccaccatacctggccaagaaaataagtttttcttttttctttttttttttttttttgagacagagtctcgctctgttgcccaggctggagtgcagtggcgcgatctcggctcactgcaagctccgcctcccgggttcacgccatactcctgcctcagcctcccgagtagctggaactacaggcgcctaccaccacacccggctaatttttttgtatttttagtagagatgtggtttcaccatgttagccaggatggtctcgatctcctcacctcgtgatccgcccgccttggccttccaaagtcctgggattacaggcgtagagccactgcgcccggccaaaaataagtttttctaagggatgaagacacttgtagaaaaaaggatctggctaggtaccatggttcacacctgtaatctcactttggcctcccaaagtgggaggatcgcttaagcccaagagatggaggctgcagtgagctatgatcacgccactgcactccagcatgggtgacagagtgagatcctgtctcttaaagaaaaaggatacaaagtacaggtaaaaagttggccactggggaagaaataggtacatctctttttaaaaagaaaggaaaatgtgagagaacagagaccagagaggaattaatgggagtaggccaaggttctcttggaagctgacgctaataaagtctttactcgccacatcttcacgtttcaggcctttcttccacagtagggctttgagggaacttcccacagtaactcaagttactcctgtcagtcgactcatccagggaccttcccctgtcgaaatcggccctcgcttacctgggcaccatggtcctgtcacatcatttgcaatcatccagggctctttcccttgctccaataaggagacgacatcaggcttagaaatggagagtcctgtttacaggaaaagaaatggggtgtgatcagaccgctccaaaatccaaacccagttccctggtcaccatggaaaagacgcaattacaaggtaggtggaaggttgtccaaaggataggaagaccgagctgcccagcagaatgacttgtttctagttccacaaagcacaaaacaatttttcagtcaccagaaattcagtcagaaacttgtaagttgccctagaaattcataatgaagaaaccagaaattccagaagggtagtcctgaattatgtggagtaaatgtgtggtgatcactctccatgaacccctccttcccctccaatctattccttgatgctcctggccttgttctgtgcccagctctgggatcccgacagctcaccgtaaggactgcattacccatgccctatggcttctcattggctttggcagacagaaagcatcagctggagatcagtggacaggaggagagagagcaccaggcatttcttaccctcctctctccctcctttgacccaggagctctggaagtagctacagctattgctggccgggcctctctctatggctgtagtttgtagcgtctcctgtgacagtttcctctcctcacccatttaggcagagatggaaactgcaccccatggttgtagtccctgttgccttgctttccgtctggcccgtgtgatacaatctccttacctagtgaggccaagtgaccaaagttctccagagtcacctccctgtacaagtccctctgagcaggttccaggcacttccattcttccagagagaactctatggccacgtccctgaatgtcaccagtccctgaaacaataaacccacgcattagtgtacattaagaaacttttttcatttattatgaaaattttcaagatgcacaaaagtacagagaatagttgacagtaatggccccccgatatgcaccagtctgcttcaacagttaacaaggtgtaccctgttttatctcttcccttctatcttttattccccatgtactgtgaggcaaatcccacatgccaaacatcataatacttcacccacagatactttagtatccaacagattatcaacaacttctcttagaaaaacacataataatcagaatatcattatcatacttaataaaagtatcaataatttcccagtcaacagattaaattctaattgccccagtgttctcaattttttttcttttctctttttttttttgagacagagttttgctcttgttgcccaggctagagtgcaatggcacgatctcagctcaccacaacctccgcctcctgggttcaagtgattctcctgcctcagcctcccgaatagctgggaccataggcgcgtgccactgtgcccggctaattttttgtatttttagtagagaaggggtttcatcatgttggtcaggctggtctcgatctcctgacctcatgatctgcacgcctcagcctcccaaagtgctgggattacatgcgtgagccccgtgcccagcccacctgacccattttaaatgaggttaaaattgatgagtagggtcaggttttgacaagctaatttatccaggaaatatcttaatgagaagatgaagaatttttttttttttttgagacagagtctcgctctgtcacccaggttggagtgcagtggcacgatcttggctcactgcaacctcttcctcctgggttcaagcaattcttctgcttcagcctcctgagtagctgggattacaggtgtgcgccgccacacttggctaatttttatatttttagtagagatggggtttcaccatgttagtcaatcttgaactcctgacctcatgatacgcccgccttggcctcccaaagtgttgggatgacaggcgtgagtcactgcacccagcctaattttgatttttaatattttgtttggtagagacagaatctcactatgttacccaggctggcctcaaactcctggtcttaagtgatcctcctgcctcagcctcccaaagcactgggattacaggcctgagccactgcactcggccaaggacattggaggagatgaagaagggtactggaggaaggaggtaatgaagcatgacagaatctacagctgcaggcctgtggcatgaaggaagtataataagcacagttatatgactagaggtctatatattcttgagcattcctgtggctacacataaactatctgcagacagcaggacacttctatcttccatggtctgggaatgatcaggaaagagctaagtggggtcccataaataagcgaaatagtgaaatacacaaaacacacagcaaacctgggcctgg[136 bp omitted]tggtaattccagcactttgggaggctgaggtgggtgaatcacctgaggtcaggagttcgagaacagcctggccaacatggcgaaatcctgtctctactaaatacaaaaaattagctgcgcgtggtggcaggtgcctgtaatccaggtacttgaggggctgaggcaggagaattgcttgaacctgggaggcagaggttgcagtgtgctgatttgtgccaccacactctagcctgggcaacaagagtgaaactctgtttaaaaaaaaaaaaagaagtccagcctggtcaacatggcaaaaccctgtctctactaaaactacaaaaaattagccaggcgtggtagtgcacacctgtaatcccagctacttgggaggctgaggcaagataataacttgatccccggaggcagaggttgcagtgagctgagattgtgctactgcactccagcctgggtgacagagcgagactctgtctcaaaaaaaacaaacaaacaacaacaacaacaacaaaacccccaaaaaagaaattagctgggcatgatggtgcgtgcctgtagtcccagctactagggaggctgaggcaggagaatcgcttgaacccgcgaggtggaggttgcagtgagctgagattgcgccactgcactccagcctgggcgacagagcaagaccccatctcaaaaacaatataaataaataaataagaatgaaagaaggaagagagaaggaagttagaaaggagggcaggcaggcaggcagaaagacagagactgttattggttgcataatatcgtatgttatgtcttgtaagatacgtcgattccattattttcgtgcacttagcttaattaagatgtgtatgttaaagtggcttatatctaaaagagaggcaataacaaatgctagtgaagacgtgaacagaagggaacccttgtacactttgttgggaatgtaaatcagtaaaatcactatgcagaacaacttggaggttcctcaaaaaactaaaaatggagctaccttgtggaccagcgataccactgctgggtatctacccaaaagaaaggaaatcagtaggccaggcgtggtggctcacgcctgtaatctcagcactttgggaggccaaggcaggcagatcacctgaggtcaagagttcgagaccagcctggccaacatggtgaaaccccacttctactaaaaatacaaaaaattagctgggcatggtagcgtgcgcctgtaatcccagctacttgggaggctgaggcaggagaatcgcttgaacccaggaggcagaggttgcaccactgccggcatgggcaacaagaatgaaattccgtttaaaaaaaaaaaagaaagaaagaaaggaaatcagtatatcgaagagatatctgcactccatgtttgctgcagcactgtccacaatagccaagatttggaatcaacccaagtgtctgtcaacagatgaatggataaagaaaatgtggtacatatacacaatagagtactatttagccacaaaaagaatgagatctggtcatctgcaacatgaatggaactggaggttattatgctgcatgaagtaagccaggcacagagagacaaactgcatgttctcacttatttgtggatctaaaaatcaaaacaattcaactcatggtcatagagagtagaaggatgattactgaaggctgggaagggtagagggaggctgagtgggaggtggggatggttaatgggtacaaaaaatagaaagaataagacctactatttgatagcacaacagggtgactatagtcaataagaacttaattgtacattttttttttttgagatggagttttgctttgtcatccaggctggagtgcagtggcatgatctcggctcactgcaacctctgctctgggattcaagtcattctcctgcctcagtctccagagtagctgggattataggtgcccaccaccacgcccagctaatttttgtattttttagtagagatggggtttcctcatg[137 bp omitted]tataactcaaaggataaatgcttgaggggttggataccccattcttcatgatgtgcttatttcacactgcatgcctgtatcacaacatctcatgtactccataaatatatataccatgtactgacaaaaattaaaaattaaaaaaatttaaaaacacaagatgtgtaaaatcttcagggtttattatacgcttgctaatattcacattccttcactgtccacttttccttgctcctgaaaccagaaagctgatggagggtatacctgagttacataaatgtggcccacaaccaacacatatgttcaacctcaaaatggaccattttatggttattcatctcatacatatccttgcaagactgaagagtgttccgtcactgaagttcccaatcacagcccccttcctaaaggtctcacaaaacagatgttaccacatacagagaccaacaccaatcactacaactcctaccatgtctatgtggagagagaaggctgtgggcttctattgcaaacaccctgataatgggtaaaacataacacccttttaaatgaatttctttctttctctttttttttttttttttttgagacagggtctaagtctgtcgcccaggctgcagtgcagtggcatgatctcggctcactgcacttctgcctcccaggctcaagagattctcctgtctgagcctcctgagtagctgggactacaggtggcatgccactgcacctggctaactttcgtatatacatatcttttgtagagagagggttttcccatgttgtgcaggctggtcttgtactcctgagctcaggtaattcacctgccttggcctcccaaagtgctgggattacaggtgtgagccaccatgcctaactttgtgttttaaaatttaaatttaaatttttgtttgtagagacggggtctcaccccagctggtcttgaactcctggtctcaagcgatcctcctacctcagcctcccaaagtgctgaaattacagggtgagccactgggcctggccagaacttttcttaatgatggttatatctatcaacattttcccaccttagaaattaaaagaaagaaatataatttttttttttttgagacagagtctcattctatcagccagtctggagtacagtgatgcaatcttggctcactgcaacctctgcctcccaggttcaagcgattctcgtgcctcagtctcctgagcagctggaattatagacatgcgccatcatgcccggctaatttttgtattttcagtacagacagagtttcatcatgttggtcaggctggtctcgaactcctgacctcaggtgatctgtctgcctcagcctcccaaagtgctgggattacaggtatcagacaatgcatccagccgagaaattttaaaaatattttaacaacaaataaacctgttacctgttaatatcagtaacatacattttatgaaacataactctattgtcaaaatcaaaaaatttagtggcattgttttacatttttgtaaatatctttaatgactggccaactaaaagaaagttggattttttttttttttgagatggagtctcactctgtcacccaggctggagtgcagtggcgtaatctcggctcactgcaacctctgcctcctaggttcaagcgattctcctgcctcagcctcccgagtagctgggactatagacacctgccactgcacccagctaatttctgtatttttagtagagacggggtttc[131 bp omitted]ctgtgtcgcccaagccggagtgcagtggcgtgatctctgcttatgacaacctcggcctcctaggttaaagtgattctcctacctcagcctctcaagtagctgcgattataggcacccaccaccactgcacccagccatataaatatatatatatttgacggtattaagtgtcttgtgactttttaaagagggggtgacatttaaaaatagaataaagaataaagcagtggctcatgcctgtaatcccagtactaggaggctaaccaattgagccccggagtttgagaccagtctgggcaacacagtgagacctggtctctacaaaaacttaaaaaattagctggtagtggtggcatgtggctctggtcctagctacttgggaggctgaggtgggaggattgcttaagcccaggaggttgaggctgcagtgagccatgactgcaccactgtgctccagtctgggtgacagagcgagaccctgtctcaaaaaacgaaacaaaacaaaaacacagaagaaagaaaccacccaagacaatggaaaagatgaaactactttatttcatgtttggccccattcaaccacagttatgataagggagactctcatatttctctcaagagaaggtatttctactgtactggtgctctgctaagagcatttatttatttatttatttagacagagtctcgctctgtctcccagggtggagtgcagtggggaaatcttggcttcctacaacctccatctcctgggttcaaacgattctcctgcctcagcctcctgagtagctgggactacaggtgtgtggtaccatgcccggctaatttttgtatttttagtagagacggggtttcaccatgttgtccaggctggtctcgaactcctggcctcaagcaatcggcccacctcagcctcctaaagtgctgagattacaggcatgtgccactacgcctagcctatgctctgctaagaggactacagacacgtggacagtgctggagaggagagggccaccgagggacttgggcaccattactcatctcctggaatggaccaactgtgagaaggatacagggaagttccaggataaagaacacagtgtccatataatctggcgggaagacagatcattctaaggatagaaggaatttcaacatacctgggccatggcttttagaactatttgacctgctctgatttctctggattcttctcttggacaagtgcagagtcctgaaaaagcaaaatggggggagatggggtaacctctgataaactgagcttgcctcagcactcccaaatagatgagcttaaaagaattgtacttccaatgtctcggatctgcttctcccacctctccatgtcctaccacacaagaactaacattaagaactacagagttggccaggcatggtggctcacgcctgtaaacccagcaccttgggaggctgaggcacaagaattgcttaaacctgaaaggtagaggttgcagtgagccgagactgcaccactgccctccagcctgggcgacagagcgagactcgatctcaaaacacacaaacaaaaaacaaaacaacaacaacaacaacaaaaaaaaactgcagagttaagaaaacccagtcccttcctaaaaagtaaggaacccaaaagcagaaagatggtttcaaggcagatgtgctccagcactgacacagaacccaggcaccaccaagggagggattacagctgacacagtcccccatcttagtgatgctaaacttggccctagatggggcctagaaggctcccacctgctccaaattacagcaaggatcttacgactcagactcactcacttgacccctaaggatgaggacagcaccatcaggctaggaacacagaccatctatgcaggccaaatcttgagtaaaagacatccctaaacgaagtcttctagcttctctgggctcaacaggcaaaacctcctgggcatctcactggctccacttcctccttccaagtccaaaatgggactacaccatgcataccataggctctgtcaatgtctccagccccagctatactcaccagacaggagcaagaaagcctcagtaatacaggcatcttgcttgcatacccgcacatccagagtactgccctccatgggaactcaatttctagaagtctcttggcccagcactctttatttctcatctgagccctccctactgctttcattcttttttaaaactagacagctgggcacggtggctcacacctgtaatcccagcactttgggaggccaaggcaggtggatcacctgaggtcgggagttcgagaccagcctaatcaacatggagaaaccccgtctcaactaaaagtacaaaaaattagcggggcgtggtggcgcattcctgtaatcccagctactcgggaggctgaggcaggagaatcgcttgaacccgggaggcagaggttgtggtgagccgagatcgcaccattgcactccagcctgggcaataaaaacaaaactctgtctcaaaaaaaaaaaaaaaaaaagacaagtacagtagtgagaagagggggaagaatagaacaaggagttcaattcataactgactgtgaacaatcaatggagataactcactaccttccgaccatctactgcttttctgcagaacatcacttccccattgactgtgaggctggcagttgctgagtccgaagtcctgtgaatggcatacatctcaagggaatgagaaatcagagttttaaggagggttctttttttccttttgagacagggtctcactctgttgcccaggctggagtgcagaggtgtgatctcagctcaccgcaacctctgtctcccaggttcaagtgattctcccgcctcaacctcacaagtagctaggagtacaggcgcacaccactacgcctggctgattttttgtatttttagtagagacgcggtttcaccatgttggccaggctggtcttgagctcctcacctcaggtgatccgcccaccttggcctcccaaagtgttggggttagcagggtatgagctactgtgcctggcctaacaagggtattaaatctgatctaattagaggtccaagaagcttcctgtagggggtgtgtcaaaagaaatacttttttttttttttttgaaatggggtttcactctgtcaccaaggctggagtgcagtggcacaatctcggatcactgcaacctctgcctcccatactcaagcgatccttccacctcggcctcccaagtagctaggaccataggcatgcaccaccacgcctggctaatttttgcatttttggtacagattgggttttgccatgttggccaggctggtcttgaactcctgagctcaactgatctgcccacctcggcctccgaaagtgctgggattacaggtgtgagccaccgagcccagctaaggaagactaacttaatgaatgggaatggtgtcaagaaaacttttctgtaaaatgtagaataggaattgggttctgaaacctcagggaagtttaataggcagaaaagggacagagaatattgtgagcagagtgaaatgcagtggcaaaaacactggactgaaagcaaatggtgtatttgggagactaagaatgatttggaatgagttgtgtagtttgaagaaaggtctagaccagtgctgtccaaataatgttctgtgatgatggaaatcttcaaatctgtgctataaatattgtagtcatagatggctattgagcatatgaaatgtggctagtatgtctgagaaactaaagtttttattttattttaattaatttaatttaaatttaattagctctagaatctagaggcagataatgctggagatgacatcaggggttagaaaatgaaggtgtataggccaggtgtggtggctcacgcctgtcatcccaccactttgggaggccgaggtgggctgatcacctgaggtcaggagtttgagaccagcctggccaacatggtgaaaccctgtctctactaaaaatacaaaaattagccaggcacggtggtgcgtgccggtatccagctacttgggaggctgagatgggagaactgcttgaacctgggaggcggaggttgcagtgagccaagatcacaccactccactccagcctgggccacagagtgagattctgtctcaaaaaaacagaaaagaaaatgaagatgtatgaatgaaaaaaccatgagggcaaggaccagtgggtctgatcatcactctaaccatcactcttgccacagtgtctggaggacataggtgaccaataaatacaggctgatgcataaaagttaggttctttgggaagctgaggtgtgtcgttcgcttaagctcaggaatttgaaaccaccctgggtaacatagtgagccctcatctctattttttaaaaaaggtaggttttcagccgggcacggtgcccacgcctgtaatcccagcactttgggaggccgaggcaggcggattacctgaaatcaggagtttgagaccagcctggccaacatggtgaaactgcatctctactaaaaatacaaaaattagctggcatggtggggggcgcttataatcccagctactcaggaggttgaggcagggagaattgcttgaactcaggaggcagaggttgcggtgagccgagatggcaccattgcactccagcctggggaacagagtgagactctctctccaaaacaaaaaagaaagaaaaagtaggttttcacttattaatgaaatggaaggaaacctaagaatttaaagacagaagtgacaggaccaatatggccaggttattttggagaggtgtaaccttggagtcagaaagattgactgagaggtacttgtacttttcagatgtaggggtgggttgcccctacactttttcaggcacgaagagggcctgacccaggacattggcagcagaaaagaggaggagagagatgaattcaaaatgtagatgagattaaatcaacaggctctggcatctgacacatatggaggcagagaaaaggaagtcagaattctttcatatttactgggctcctgtgtcaactggcactgttctaggaacgaggaaagaaaataattcaagtccctgtcccagttgatctcacattctgtttttttttttttcttttttttgagacaaaatcttgctctgtcaccgaggctggagtgcactgacgagctctcggctcactgcaacttccacctcctgggttcaagcaattattttgcctcagcctcccaagtagctggaattacaagcgtgcaccatcatgctctgctaatgtttgtaacttttgtagagacggggactcgtcatgttggccaggctggtcttcaactcctgcctcaagtgatatccccacttcagcctcccaaagtgctgggattacaggtgtgggccattgtgtctggctggacctcacatcctatgggaagagacaaccaacaaacactgacatacggagatagatgggattgagggctgggcacagtagctcactcctgtcatctcagcactttgagggaccaaggcaggaggataacttgaggtcagcagctcaagaccagcctgggcagcaaagtaagacccccatctctacaaaaaatttgaagaaaaaaaaaagaaaaaagatgagatgtgagtatttagggtggtatggccatagacatgatattgatattcctaattatatgtcaggtggggccaggcacagtggctcatgcctgtgatcccagcactttgggagggcgaggcacgcggatcacttgaggtcagaagttctagaccagcctggccaacatggtgaaatgccgtctctactaaaaatacaaaaaattagctgggtgtggtggcgcatgcctgtaatcccagctactcaggaggctgaggtgagagaatcacttgaacccaggaggaagaggttgtagtgagttgatattgtgccactgcactccagcctgggcaacaaagactctgtcacaaacaacaacaataacaacatatgtatatatagatgtcaggtggcaaatgtcctacagataaaaacaaagaagattaaggggagagggagttttggaggaagagagggtggtctgagaaggtgacaggtaagcacagcctgaatggatgagtgagaaatgcaggtatctggggaagtgcacgccttgcaccaggagcggcaattgcaagggtctgaaggcaggagcaggctttcctcgatcaacaagaggaaggagacaagggcagctgggatggaacatgcgagacgaagagggtcagagagagagctagaagccagatcacaaggagcttgtaagccactgtaagaactttggattttattcttaaggaaaacaggaaggtacgaaacttttaaagccaaggaatggcataatctgatttatatttaaaaggggcggggcacagtggctcacgcctgtaatcctggcactttggaagatcaaggtgggcggatcacctgaggccaggagttagagaccagcctggtcaacagaagccctgtttctactaaaaatacaaaagttagctgcgtatggtggtgagcacctgtaatcctatttactcgggaggctgaggcatgagaattgtttgaagccaggaggcggaggttgcggtgagccaagattgtgccactgacaccagcctgggtgacagagtgagactccatctcaaacaaaaaaaaaaatacataacaaacaaacaacaaaacaaacaaacaacaacaaaaagaaaagaaaagaaaagaaatgggtcttagccagtgtggaagacattactatgtttcaccattatccagtttggggcacacagaaaatgacattttccagccccttgcacttaggtagggccatgcactgctctagccaatgaaatctcagctgaggtgatgactgtcacttcagttagagacagacaccagaaagactgcacaattctccaatttttctcttcatgcatgtggtgaccatctgtttttcaaatgatgcagctaaaggtggcgggccttctttggtgtggaaccctgtctctgctgatccacactggacatgtacatgagcagaaataaaatgtgactctgtaagccactgagattcaggggttgtttgccaccacagcataacttagcctgtcctaaccagtacacaaattaggccatactttgactagataaaaattcagactcagacgcttggtcaatatgagaaagagcaatttttaaaaagaggaagcttcagaaataagagcagagctgtccgattccagctctatatgtctcaaagggatttttcacaaacccataatgtgaaacaaaatgtgaattatgagttacaggacaatttttttttttttttttggcagggcagggacaggatctcactctcacccaggctggagggcagtggcgcaatcacagcttcagcctcctgggctaaggtgattctcccacttcagcctcccaagtagctgagaccacaggcatgccactacacctggctaattttaaaattttttgtaaagacagggtctcaatatgttgcccagtctggtcttgaactcctggccttaaatgatcctcccacttcagcctcctaaaatgctgggattgcaggtgtgagccactgtgcccagccaacaagttgattctgacccagcaaaaccatgctgttttagagctccaacatcaaaactttgtacaaatccttctggaaagttgagctatctctacaccacctagtaaaacttgaagctacgtgcctaaatgttccccatctctgcaattcacagacattctttagggcctgggatcccacatcacaagggcctaggctcaggggctgagataagttggccaagttatgggagctagacaggtacaggaatctccatcttaaccttagtaatctcttcctgaaaaagcaatcactctgagtaaaaactctaacaaaagcctttttcccaatgtttttattatttatttttttgaggtagggtctaattctgtcactcaggctgcagtgcagtggcatgatcacagctcattgcaaccttgacctcccagactcaagagattctcctacctcagcctcccaaatagctgggactacaggtgtgcatcaccacgtctggctagtttttaattttttgtagagatggggtttcgtcatattgcccaggctggtctcaaactcctgggctcaaacaattttcccacctcgacctcccaaagtgctgggattacaggcgtaatcatttacgcctgtaatttaccctaaaatggtaaattctttgttatgtttatttaaccataaaaccaagaaagtaacattattggttactgaaataggtaagtgggaactgggtagaaagaacaaagaaccggggctgggcgcagtggctcacacctacaatcccagcactttgggaggccgaggcggttggcaacttagtgaaagcccatttctacaaaaacacaaaaattagctgggcatgatggtggatgcctgtaatcccagctactcaggaggctgacgtgggaaaattgcttgaacccgagaggtggaggttgctgtgagccgagattgcgccattgcacgctagcctgggtgacagagcgggactccgtctcaaaacaaaaacaaaaacaaaaaacaaaaaacaaaccaacaaaaaacaatgggcaatgggattgggagagaagaaatgatgactcagtaaatccttttgtctgattctgacttttagaacaatgtgattgtttcacatactcagaaaaatcattaaattcaaccaggatgtgaggggaacccaaaataaaatacaaacagtaataaatgaacaatctatattacacataaatattatgaatacaaagggtttagggaagaaagtagttttagaaaactgtattttcactatatactgtaagactaaagacaaaaagaactgtatggtacatggaagtcagcaattcttaaattactttttacacaggactgagcaaatatatttatatatattaatacatataatggttaataaataaattatattatggttaatgtgagccacatttttcaatgtcaaagaaaggagttacaaaaagggaaatggaggcaagacatggtggttcacatctataatcccagaactttgggatgccgaggaaggagaatcacctgaggccaagagctcaagaccagcctgggcaaatagtgaggcccttgtctctacaaaaaatcttaaaattatatttaaaaaaaaggaaatggaggccaggtgtggtggcttatgcccgtaatcacagcactttgggaggcagaggcaggaggatcacctgaggtcaggagtttgagaccagcctgactatcatgacgaaaacccgtctttactaaaaatacaaaaaaaattagctgggcgaggtggtgggcgcctgtaatcccagctactcgggaggctgaggcaggagaattgcttgaacctgggaggtggaggttgcagtgagccgagatggcaccattgcactccagcctgggcaagtaaaattctgtctcaaaaaaaaaaaaaaaaaaaaaaaaatctggaaatggagagaaggctagaatgaaccctgtagtgttgcactgaaattggagatactatatgaactcatgaattatttgtatatacatacatataaacacatttcatagctgagaggacctagaagcaatgacatctcagaagcaatgaagatatctaaccttggtttcaaaaaatcatttttttttttttcctgagacaggctcttgtttcatcacccaggctggaatgcagtggtgtaatcttggctcgctgcaacctccgcctcccgggctcaagcaatcctcccgcctcaacctcccgagtagctgggactacaggtactcgccaccacacctggctgaaaaaaaatcattttctaataaaaggaaccaatggtccccgggaaatttgtagattccaggactggggcagggaaagtaccacatcaacgtggaacaccttgtggtgccagaaaataaataataaaaatagtaaataaagaggccacattgaaaggacacaggaatcgacttgaaggggctcccagtggccaaatgtgtgataatttgagcaaaaaaaaaaaatgatagcaatgaatatataacctatagaataaaagagattataacctatagaagaaattccagtctatacttatagaaataatttagtaaataaaaaaatgggaaagaagaaaaatatctttctaacagtaagattctaattaataaggccaggcgaggtggctcacgcctataatcccagcattttgggaggccaaggtgggcagatcacctgagatcaggagttcgagaccagcctgtccaacatggtgaaatcccatctctactaaaaatacaattattagccgggcgtggtggtgtgtgcctgtaatcccagaaacttgggaggctgaggcaggagaatcgcttgaatccaggaggcagaggctgcagtgagctgagatcatgtcactgcattcccagcctgggcaacaagagccaaactccaactctctctcacacacacacacacacacacacacacacacacacacaattctaattaataaacatagaagtggccgggcgcggtggctcacgcctgtaatcccagtactttgggaggccaaggtgggtggatcacgaggttaggagatcgagaccatcctggctaacacggtgaaaccccatctctactaaaaatacaaaaaattagccaggcgcggtggcaggcacctgtagtcccaactactcgggaggctgaggcaggagaatcgcatgaaccagggaggcggagcttgcagtgagccgagctcgcgccactgcactccagcctgggtgacagagcaagactctgtctcaaaaaaaacaaaaaaaaaaagaagaaaaaataaacatagaagtgatgatggaaacaaaccccaaaaccccaccatttgacaaatagctggtaacaactttttcaggcaagcgtcatcaacggataagactaatagatgaaaggaggataagaaacgggatattcacataggcttaaagtatttcttcacaagacatgtatcaattataatgggaaaaacagtgactttgcagcagagaaatctggcaatcaccgtcttaaccaagcggttaaaattaataccactcatagtgtaacgaattgacctcgtgggtccctggcatgatgcgccgagaagggtacatcgctttcggagtattcttgccccaaaggcagaatctgaatttaatcaacaggaaatatcagacaattccaaagagaggaacattctacactgcagactctacaaaacaaatggccaacatggtgaaaccctgtctctactaaaaatacaaaaaattggctaggcgtgtcaaaggagttacaaaaaggaaaatggagaccagacatggtggttcacatctctaacccagcactttgggatgctgagggaggaggatcacttgaggccaggagttcgagaccagtctggccaacatggtgaaacccccctccccccgtctctactaaaattacaaaaaatcagctgggcacgatggcatttgtctgtaatctcagcttctcaggaggctgacgcaggagaatcgcttgagcctgcgaggtggaggttgcagtgagctgagatcacagcactgcactccagcatgggtgacagagcaggactccgtctcaaaaaaaaaaaaagagcaaatgggaattctattgttgctacattttaaagtcttaaattcaaaatgaaaagtaaagaaaaaaatttaaaagaacattaggtatgcagggagcagggaggatataggcctttcagtccatctccaaggcacgcagtaaattactcctatggcaaatactggagaccaggttactttggtaggggtgagggtggtggtggggtggttctgaagtttcagaagaaggaaagaaaagcatgtcctgaaaaacaagaaggatttcagagaaataagaataaaacctgatgtacttgaacttggcacctttcttggagaagggttaagagcaaggaatcatgaacaaccaggtcatttttgaaccaccatcctccttacctaccatatagggaagtgtggtcacagaacaccaggcatctgcctaaatccagtgtcactcagaaggctgaggtcactcctgtccagggccagaatctgtcctaacttcaaaggttctgcatgggtcaagcactagagtcactggcacacttggtgctgcacatacagtcagtgtcacacaaacataaccacacatccactcttttatttttttgagacagggtctcgctctgtcacctagactggaatgcagtggttcaaacacggctcactgcagccttgacctctcaagctcgagatcctcccacctcagcttcccgggtagctgggaccacaggtgtgggccaccacactcagataatttttaattttttgtttgtttgtttttgagacgaagtctcgctcttgtcccccaggctggagtgcgatggcgcgatctcggctcactgcaacctctgcctcctgggttcaagcgattctcctgcctcagccccctgagcagctgggattacaggcacctgccaccacgcccagctaatttttgtatttttagtagagacagggttttatcgtgttggccaggctggtctagaactcctgacctcaggtgatccacccgcctcggcctcccaaagtgctgggattacaggtgtgagccaccgtgccagccattaattttttttttttttttttgtacaggccaggctggtctcgaactcctgggctcaagtgatcctcccacctcggcctcccaaagggctgatgtgagccaccacacccggccctacatccactcctgagacacaggacacaatcacagacacctctatacctttccagtcacaatatctttccagtcacaatcacacacccgctaagacacacccagtcacacaatctactctccactgtgatacagttactcccgtatagtcacaagccccacacaccaacacccacaaatgcctcatatagtcacagtcacacacccactcaggggacacacgccatcactggtactttacggcacccagtcacaactgaactttcactgtggacatacacacagtcacactcacacaagcaacccacacaagcagtggcaccccactcccgcatacacagcaccacacacatacacacaaacacacacaccaagggatacaggaatacacaagcggcgtcaccacacagtcacaggcacaggcaattgcacacggccacagtgtcacacaaccaaaaccacgcacacaccttggagacatgaatcacaaccgcacacccgcagtggtcacacagtcacaactgtactcacaccccaggaacagggcgaacaggccacatatacaacggggacacacgcagtatcacccccggtcacaaggaccctgcaccccgatactctctatcacacatggttacacaaaaaccaccagacaccctggagacaggcggttacacgtgcacagttgcagacacccacacccagccacacagccacaaagacacattcagaacggcgcatccgcagccagctcccgcctgcgcgcacagattcgaggctccggacacgccccggccccgcccaggactcccagacccctcaccttctgcctcccctggtcgcgtccgggtccttgcggagctaactagctcgccacgacgtcaagaacgacgtaacgtcaggccgctgtgggctctgggaattgtagtccagagctagatcggccacggacagaatggcgttctcttatctctgagtcggggcctggctcgttttgacatttttgcgcccacgagtcttcggagagggcgtcgccactccagaccttccagcaagcttgaagtcatctgacgctaaaggactacttacctcaagagctccatcgtcacagaaggaggcggccaagttcgcggggggaggggaggagacagagagtcgaccagtaaagcctcaagggaaatgtagtccaaggcctgagaagcgacgttgctggtaatagaaggtaattcagtaccagcctgggcctggccgcggtgaccgaggcgggccgcgtcgcggagacttctgggagtgcttcctcgctctccgagtgcgcaagcgcagcgcaccgagtggacattttggtctttgtccgcgggtcagtacggcccctgggtccacgtggcgcgaaagtaggaggtgggatctgggcgtctcgggtcggtcggaccggggaggttaaaggggaggattcctgatctttaggggcgcggcgcgagggcagggagtgggtgtaagagcttctggcctacgtgcggggcggagatgggggcctctgaggcgggtttgagcgagtgtgaccgagtttgtcctcaaagtttgacctgatgtttgggattgttgagtgaatgtgaaactgggtgcgggattgtgtgtgattgtgcctaagagggagatgtaggagaccagcattgaggtataacgtttgagctgcacttcccttgtcgaaagtgctgataattataacggtgccatcttcctggagcgtcttttttacttgaaaattgaaggggtggaaaagctaagtggtgaataattttaaaacgagtttttatataaaagcatttctttttaattggagtggcatgcaaatcaccgtgacttttttttttaattaaacgagagtgtttcgaaggaactttagtttcggggtgcctacttcagactattcaaatccccatctttggggtacttaaatagggctgttaagcaaagccctagactaaacagcattgtacgctttgagaagcaatcccatataacggcgcccaggatgagggagtcaacggttttaggttaggcacagttatcctcattttttgaagaaagcttaattgttgcagtgtttatctatgagtctggactaaatcctaggtgtcttaattccttaatgagtcgaggcgttctcaggttgtatggattttgtgaagtaatggagaatgctactgacgtctccaaagatgcgttttctaaggaaatcaccccgcccccgctgtcgtcattgacatagttttaaattacaaaaagttaaataaagtaattgggtaccaagttaatatctataaataaatagccttctaatttacaaatatcagttagaatacatagttgaagaaaactaatatttacaatagcagtaaaaagataaagtattgtggaagaaacttaaaggttcagaactattaggaaagaactttaaaatactactaaggggcataacaaatgtgaacaaataaatataccatgtgacattaagaagtgtgcgcaaacttaagtgaatgtattaatttactgtgatcttggtcgggtgcggtggctcatgcctgtaatcctagcactttgggaggccgagatgggtggattacctgagatcaggagttcgagaggagcctggccaacatggtgaaaccctgtctctactaaaaaaaaataaaataaaaaaatacaaaaattagccgggcgtggtggcgggcgcctgtaatctgagctaccgcggaggctgaggcaggaaaatcgcttgaacctgggaggcggaggttgcagtgagcccagatctcgccactgcactccagcctggacaagagcgagattccgtctcaataatagtaataatgtgatcctaataaaagtatggacaggcttttctcttttggaactaggggaactgatcctagacttactatggaaagagacaagctgcaagagccagtacagactgagaaagaaaaggcgttgaggtgtggggagatggggacccaacacattttaaatataaagcctcaggccgggcttggtggctcacacctgtgagccaaggcaggaggatggctagagtccaggagttagagaccagcttgggcgacatagtgagatctcccgtagtcctagctgcttgggaggctgaggtgggaggatcacttgagcctaggaggtcaaggctgcagtgagcagagatcctggcgacagcattccagcttggtggacagccagtccctgtctttttttttttttttttttttttttgagatggagtctctctctcttgcccagtctagagtgcagtggcccaatctctgctccctgcaacctctgccccccaggttcaagcgattctcttggctcagcctcccgagtagctgggattagttgcctgccaccacacccggctactttttttgtatttttagtagagacagggttttaccatgttggccaggctggtcttgaactcttgacctcaagtgatcggcccgcctcggcttcccaaagtgctaggattacaggcatgaaccacggtgcctggccgaccctgtcttaagaaagaaagaaaggagagagagagaagaaagaaaagaaaaacagttcatgcccatcagtgggagattggtgtacatcgatacaacaaaataatacatagctgtacaaaagaatgaggaggaagctctttatatactgagacagaaataacttcaaaatgtattgttaactgagagaaagcaaggtgcagaatgtagagtatgatacacgatgcatttggaataagaaaaggggtaataagaatatgtatttataatcccagcactttgggaggccaacgcaggcggatcacctgaggtcaggagtttgagaccagcgtgaccaacatggagaaaccccgtctctactaaaaatacaaaattagccaggcgtggcggcacatgcctgttaatcccagctacttgggaggctgaggcaagataattgcttgaacccgggaggcggaggttgcagtgaacagagattgcgccattgcactccaacctgggcaacgagagtgaaactccatctcaaaaaaaaaaaaaaaaattcaaaagatacatacgaaataataaaactggctgttggggtgggggtactggaatagacagggcaaaggctttgtatttttagtagagacggggtttcaccatggtgaccaggctggtctcgaactcctgacctcatgtgatctgcctgcctcagcctcccaaagtactgggattacaggcatgagctaatttttttttttttttttttaaattaaaggaagacataggccaaggagccagacttcctgtgttaactccttcctctgccactttttaccttggggacctcaggtaggtacttaaaccttgggcctcagttgctcatttcatagtatagaaataatagcaatatttgattcaaagggtggttgtgtagctccagaagttaatacatgtaaagttctaagaatagtccccagtgtgtagtaagtacttgattaatgttaaatactagtactttttattactagctgcaaaaaaaatgcttcctcagaaaatattatagtcctgtgtctggtaggaatttctgaaagaataagatatgtagatgcacttttgttattaatatttcttttttttttttgatggagtctcactgtcgcccaggctgcagtgcagtggcctgatctcggctcactgcaggctctgcctccctggttcatgccattctcccgcctcagcctcctgagtagctgggactacaggtgccagccaccacgcctggctaattttgtttttgtatttttagtagagatggggtttcaccgcgttagccaggatggtctggatctcctgaccttgtgatccacctgcctcagcctcccaaagtcctggcattacaggcgtgagccactgcgcccggcctaatatttctatattttaatttttttacttaaaattttctttttttttggtggagggggggacagagtctcggtttgtcgcccaggctggagtgcagtggtgctatcttggctcactgcaagcttcacctcccaggttcacgccattctccagccttagcctcccaagtagctgggactacgggcgcccaccaccacgtccggctaattttttgtatttttagtagagacgggatttcaccg[136 bp omitted]atcaggaagttaggtttgttttttgatttttgagatggggtctcactctggctcaggctgggtgcactggtgcgatcacatctcattgcagcctccacctcctgggctgaagagatcctcccacctcagccccacccccgcagtggttgggactacaggtgtgtgccaccacgacctgctaatttttaaacctttttttgtagagatggagtcttactatgttgcccaggctggaagttagatttctgtgtttgagttatgtttatctttagaaagtcatcattatccgctcctttggaagatttgttctttgatttctatgattacttttgcatggttctaattcagaatctctgatgattttttttttaattctaattgtgattgatttttggccagaatacatcagaggtgatcttacatacttcaaattgcataccattaggagagatataccagatggctggtgattgttacttccctttgaccaaaatgttatgtttactttggttcattctccatcagtcatttagtggatggttttaaaaccaatacataattcttggctggatgagtaaatttctacaggtattgtaaagtgatgattttctgttttttttgttgttgttgtttgtttgttttgtgtaaaaatgtagtagtctatacgttaagagaaacttctgggaacaaactagaaatgatccctggaagtatagtcttaatttctcttgtcttttcattccttttacatttgtttcattgttacatcaaattgtatctttttttccccctggctttttctttcttaaacatcatcctaaagttgtgtatatttagcgtgttctagaatcagctgcactttttgatgccagtggataccccttcaggtcattcttgtctcattttggctgacatcattgatcttggaaagttttcctgcactgcaggcttgtatcttcctcccagacttggaattgaccatttctccaaggagctctggttccttttattggagaatggtattagagacaagatcaagggtgtgctcattgcccaggggtaacattgttttaaggccattttaaattgcagagcatttaaaaaatacatttttaatgtatttttaaaaatcatgagtccatattcgtatttctaattcactttaaatggtatagtatttttacctaatttcttagctcctagttcttttttttaatttaattttattttatttttgagacggagtcttgctctgtcgcccaggctggagtgcagtggcacgatctcagctcactgcaatctccgcctcctgggttcaagtgattctcctgcttcagcctcccgagtagctgggactacaggtgcatgccaccacgcccagctaagtttttgtatttttagtagagatggggtttcaccgtgttagccaggatggtctcgatctcctaacctcaggtgatctgcccaccttggcctcccaaagcgctgggattacaggcgtgagccacggcgcccggcctcctagttgtattttatagtaaaaaatatgaaacaagttataagtacttattttgtttgctttatcctgcaatataaagaaaatggtttcagtaacaatgctgatactagtagtaaccataaacatactgtatcatgttaaaaaattctttctttaatatatgtaactatttttgttcttaaaatgcatcttttttttttttttgagatgttgtcttactcttttgcccagggcagagtgcagtggtgtgatcttggctcacttgcaacatctgcctccccagttccagcgattctcctgcctcagcctcctgagtagctgggattacaggtgcccaccatgacgcctagctaatttttgtatttctagtagagacagcgtttcaccatgttggccaggctggtctcgaactcctgacttcctactcgtcttggcctcccaaagtgctgggatttcaggcatgagccactgagcccagcttttaaaatgcatctcactaaagatgtatgtagtcaaagaactctgttctaaagtcatttgaaatcgtttttctgaggaattatgttactaaattaacatacagttgggttcatttgttgttttcaggttaagggactgcttttttttttttttttttttttgagacggagtctcactctgtcccctaggctggagtgcagtggcgcaatctcggctcactgcaagctccgcctcccgggttcacgccattcttctgcctcagcctcccgagtagctgggactataggtgtcagccaccacgcccggctaattttttgtatttttagtagagacgaggtttcaccatgttagccaggatgatcttgatctcctgacctcgtgatccacccgcatcagcctcccaaagtactgggattacaggcttgagccaccgtgcctggccaaggcactactttttaaaaaatgaatttgattactattgaagtaagtaatgcatttctgtgattcaacaaagatctatctcacagagatatctcattctgctcccttcccccagtcacattcttctttgtcttatgtaaacatgtcttgtttttttttgtttgcttcttgtttatccttcaagtgggttttttgttttttgttctgtcactattatatatttctcttcactcctgtttccctccaccttacataaaagatagcataccacatgcacctccctatatctcactttctttaataacagtatgtcctagagatagcccttccttttttctttcttttttttttttttttttttttgaaatagtctcgctctgtcacccaagctggtgtgcaatggtgttaacatggcatactgcagcctccaactgctgggctgaagtgatcttcctgcctcagccgcctgtgtagctgggaccacaggcacactccaccacacctggcttttttactttttgtagagatgaggtctcactgtttcccagattggtctcgaactcctgagctcaagcagtcctcctctcttggcttcccaaagtgttgggattacaagtgtgagccactgcacccagccaaggtgttccttcttaatcataatctttaaaagaaatttttttttcagctgctgtataaataagatgtcattatttggatgcaccatggttgattcagttaatcccgttgttgagcatttggattgtttccagtcttctgctgttgctaacaatgcagtaatgaataatttttttatgtgcgccattttatactgacacaggagtagctctaaactagactgctattaatacaaatggcgctgcccagtgggtaagtacttacactcccacaagccatgtgcgagagcgtcttccccttaaactcaccatgagtgtagtgtcgaatatttggtatttcgctagggacataagagacaatctgaacttcagtgtaggtttcatttacatcccttcttatgaatgagaatttttttttatatgtttaaaggcctgtatgtattaatctaggaactgtctattcatatccttttcaccatttttctatggggtgtcttctccttagaggagctgtttataaattagaaaggttagccctgtatgaaatgagtggtggctttttttttttttttttttgaagttttcatttgcatttggacattgttcacagtggtttcttttttttttaatcttgcagaaataagaggttttgttttaatttagtaataatagtttctttttttacatagccgtgcttagaatgagccccctgtggttggtgagcacagagacatccccgcaccacaccaaagacctttttattcatgtattttttagaggcacagtctcactgtgttgcacaggctggccttgaacccctgggcccaagcaagtctcagactcccaagtagcggggactacaggcagtgcaccac[139 bp omitted]gtgaaaccccgtctctactaaaaatacaaaaaatttagccagtcattgtggtgcacgagatcacaccactgcactttagcctgggcaacagagtgagactccgtctcaaaaaaaaaaaaaaatctagttacatttttttctttttgagatggagtatctctccgtcccccaggctggaatgcagtggtgcgatttcggctcactgcaagctccgcctcccgggttcacgccattctcctgcctcagcctcccaagtagctgggactacaggcgcatgccaccacgcctggttaattttttcgtatttttagtagagacggggtttcaccatgtta[135 bp omitted]gtttcaccgatattttcaaattcttataaagttacagttttttgttgtttgattgttttagagttggatcttgatctgtcacccaggctggggtgcagtggcgtgatcacagctgactgcagccttcatatcctcgctaatttaaaaaaaaaaaaattgtagagataagatctccctgtgttgcccaggctggtctcaaactcctgggcccaagtgatcctgctaccttggcttcccaagtcagagcaatagtttttttaagattttgtttttattttaatttataatccatttagattttatcctggtgtatgctatcagatatgcatccagctttacctttttccaattggctaccacgttctttgacatcatttattaaaaggtcttacctggctgggcacggtggctcacgcctgcaatcccagcactttgcaaggccaaggtgggtggatcacttgaggtcaggagttcgagaccagcctggccaatatggagaaaccctgtctctactaaaaatacaaaacattagctgggtgtggtggcacatgcctgaatcccagctattcggaggctgagacaggagaatcgcttgaacataggagggcggaggttgcagtgagctgagattgtgccactgcactgcagcctgggcaacaagagccaaactccatctcacacacattaaaaaaaggtcttatgtttactatttttaggatgccactttgattatatactaaattctcacatttatttggtctgtttctgggtgtgagcagaaagactgaggacactgctatagcccaggtgtaacaaccagggaaaatatttatctttttactattgaggctttatcattgtgttttactttgtggtatagctagtctcttaattgctcgtccttttcagtgtttcctggctattcttgcctgtttatttttctttgtaaattttaggattagcttgtctcgttccagagggggaaaaggtagaactagtttgttacttttattgggattgcattaaatttataaaataacttgggaatagggacatttttatgacattaaatattcctctttatgtacgtgatacgtattctcgtttctttttgggtcctctagggtgttttaaaatttttttcatacaggtttggacacttcttactaagtttatttctggatgttttgttttatgttgctatgaatggagtcattgttggcatatatgaagctgttgatttctacatactaatattattccctgctttccttagttatttgtaattagattatataattgaggcagtaggcatccttgtctgtttagaatctaatagaaatgccttcagtgtttttctattacttttattatcatgatttgcttttcagtgtttttacattagataagatactggcttttgtggtcagatacagattatgattatataaatatagattacccatgctgcctgggtcagtgggagtgtgagcagaaagactgaggacactgctaatagccaaggtgcaacaaccagggaaaatctgttgattgaggaaacaacaatccctcaaaatttcgttattgcatccttaaacaaaaaatcaaatgggacaaaaataagatgtctattcctattcttctgttttctgtcgattcccttcttttgggtgactgtttctttactcatttcctctgtttatcttttgtggtctatttatagctttgcttccttcttaaaagttttgtgtcttaagttcattttgttatgtttcagttttcatctgctttgtgattcttacttttttttttctggctcactgcaacctcaacctcctaggctcaagcagtccttttgtctcagcctgtcaagtagctgggactacaggtgcataccaccatacctggctagtttttttgtatttttttttagtgctaagcacgctggtcttgaactcctgggctcaagcagtctacccacctcagtgtctcaaagtgctgggattacaggcatgagccaccaagccctgcccctgctttgtgattcttttttttttttttttttttttttttgagacagggtcttgctttgtcacccaggctggagcacagtggcatgatcacggctcactgcaacgtccacctcccaggcttaagcagtcctcctgcttcaggctcccaagtagctgggactacaggcatgtaccaccccacaccctgctaatttttggatttgaattttttgcagagatggggtcttgccatgttgcctaggctggtcttgaacttctgagctcaagtgatcctgcccacctcagcttcccaaagtgctgggattagtggcatgagccactgcgtccagcccacggtaacatttctccctgtgtcttcagcagcagtaatagtctgacaactggcaagttcccatttctgttctagccctattctgagctcctgatctgtatatccaactgcctaatcgatctctctgcctgcatgtgttcagaaacctacactctgaatgtatagagtctcaaacttgatctccctcctgcaagttgcttccagccaactcaccttctcgtgtttctgtcatgtatgtttcggtttaaatcatgctctaagccttatatctctgacacaccccattaggaattgggtgatcaagctttttcaacatacatagtggatggggggtatatatgtgaaacttaaattttttatgattatgcttttttatatgattacaactttatagaagagttggaatagtacagagaagtcccatgtatcctttacccaatttcaccaatcatttacattttggttgttttatttttccttctctctttctccaaatgtgtatgatttttttttcctgaacgatttgaaaccagttgtggacatgcttcctttatctataaatacttcagcatgcattttgcaagaacaaaaacattctttttcataactacagtacagtgatcaaaatcgggaagtttaacattgatacattagtattatttaatccaaagtccatattcaaatttggtcagtcatcccaataatgtctgctattgattaaaaaaattcttttgggccacgtgcagtggctcacaactgtaatcccagccctttgggaggccaaggcaggtggatcacctgtggtcgggagtttgggagttcagcctaacacagagaaactccgtctctactgaaaataaaaaattagtggggcatggtggcgcatgcctatagtcccagctgctccggaggctgagacaggagaatcacttggacctgggaggtggaggttgcagtgagccgagatcgcaccactgcgctccagcctgggcaacaagagtaaaactccatctcaaaaaaaaaaaaattttttttttggctgggcgcagtggctcacacctgtaatcccagcactttgggaggcagaggtgggcggatcacctgaggtcaggggttcaagaccagcctggccaatgtggtgaaaccctgtctctactaaaattacaaaaattagctgggtgtagtggcgcatgcctgtaatcccagctactcgggaggctgaggcaggagaatggcttgaacccgggaggcagaggttgcagtgagcagagatcacgtcactgcactcccagcctgggcaacagaacgagtctctgtcacaaaaaaaaaaaaaaagatttttttttttcttttggagtgcagtggctattcataggcatgatcatgtatttgcagcctggaagtcctgggctcgagtgatcttcctgtctcagcctcctgagaagctggtactgcatgtgcacaccaccacacctggcttaaaaatgttttttgaactaatggatgaacctgtattccaggttgttgcttttcttttttatgacaaggtctcactctgtcaggccatcttgaactcctgggctcaagtcatcctcccacctcagcctcttaagtagctgagactacaggcgcacaccattgcgcccagctaattttgtatttttataaggacggtgtgtcactgtgttgcccagcctggtcttgaactcctgcactcaaaacgattcacccacttccggcctcccgaagtgttgggattataggtgtgagccactgcacctgggccaggacatctctaatatgaaataggacacggcacggtggcttacatctgtaatcccagcactttgggaggctgaggtgggtggatcacctaaggtcaggagttcgagaccagcctggccaacatggtgaaactctgtctctactaaaaatacaaaattagccaggtgtggtggtacacacccataatcccagctactcaggaggctgaggcaggagaattgcttgaacccaggaggcggtggttgcagtgggctgagattgcacaattgcactctagcctgggcaacaggagtgaaactgtctcaaaaaaaaaaaaaaaaaaagaaagaatttcactctcagtataatgcaaagagggtaaataggacttcaggaaaatgtttgagtttttattcttgagtactgtcagaacaacttcttcacattgtgcccatgtgctttagttctgatgggaacgtgttaaagtcagacatgggtgttgaattcatccacgaataagggctgtagttaaaatcctctcaggaccctgagtgggagtgtggtgctagagaaaaacagcaatcactcacacaaggtgtgaacagctctcctgtgtaagtaaaattctgaaaggtaattctccctttctcccatttctggatgtgtgtagactttaaatggtttaatgagcatggctttgaagtttaggattctaatggccctagtccctttgcccacatgattgtgtgtgctttagtcactaaggcagaaggtcattactttgttctgtgcatctttggaagttgcaccctcattcttcagaaggccaggagaccccagggctcagcctgagttctaggatggtactttggacccagcattaacattgtaatactgtgtcattttcccaatagttaatatgatcctctgttgaagcaagaagacaaactgtatggtggagaaagaagtgggaaggatctgcgcgggtgagtaaatgacaggcaggccacagtttttcagtcagcattgagtcctctgaagtgcttcaaaggatgttttcttccaggctgtagacatatagagtattgcttggtatgagatttttagattcctgaatgacgcttccagtcatcatttttgtgtgtttcattattcttcttctttcaccagattctagaggggccaggcgcccctcctgttgctgttctgatgtcagccttcctgcttcgtctgtgccgccactgtggtggctgttctccttcatccacataccttttcctgtcctcacacattgtcctttatactttgtaaaaccttacatattgtctgatattcaggttcctttttgttactaccttctctcatcctttctagtggctgaatgcctcagaattatattttacacctgttctcacacttcccgttgtcttctcactcatctctgccatcgtagatccatggactcctctgcctacctttcttctgctcccatgtacctctgtcataagttgttgacctagaaatcagtttttccctctgctacttttatgtgtgggggtctatatgtatggcacaattacagctcactgtggcctcagcttcctggcctgaagtggtcctcctgcctcagactcccgaaaaaatctcctcttaactcttgactcttagtcctgcagtttttttgcaaagttgtggtcacgtttacgcgtgtcacgtatatccttcttgaggtaacctaggaataagccagtatattatatctatgctgcaaatatatatacatataagccctaatttttccttttcatataaatggtggtatattatatattctattatgtacataagtttttttcttagaattctctgtcaacacataatttgttatttattttcatttttttgagacagagttttgctttgtcacccaggtggcagtgcagtggcacagtcttggctcactgcaacctccgcctcctggggtcaagtgattcttgtgcctcaggctcccgagtagctgggattacaggcatgtgccatcacacctggctaatttttgtatttttcatagagatggggttttgccatgttggccaggctggtctccaactcctatcctcaagtgatctgcctgcctcggcctctcaaagtgctgggattacaggtttgagccaccgcgcctggctaacgcataatttaacctgtctcctactaatgggcatttaggttgttttcaggcttctgctattgaagacacaagtgtgtatacttgtttatattgctttgcagaaatatgcagaaacaactacatagcatttactttttaagtggaatacagggtcaaagttatgtttataaatttaattgagataagcacattgctctcaaaagaagtaaacccatttacgtttctaccaagctgatatattcacatcctacaagtatttattgcatgatatgtattaggtactatttcagatgctagggaaatgtcagctatcaaaacagtcaaaaatttcttcctcctagggacggtgttataatggggagacagacaatgagtaaatacttaaaaaatgtatactatcagatagtgataagtgctatggaaaagaataaagtaagggaaaaccggtatagagagggctagttggggttgtaattttaaatcagcttggtggggaaaggtctcactgaatgccatttgaaaaaagatctgaagagtgcgagagtgggcgtgcagcattgggtggaagatcattagccagaaggaacaaaagtgttaaaagccctaagtcaggagaagcttgctgtcctgttcagagaatagtgatcagggccgtgggctggaagagagagggcaaaagggaataagagtagcagtggttaggtaacaggtcaaatcacaggtttcaacattgattctgagtgatttgggagacccaacagagggccagccttccttccttttccttttcctttttttgagactgagtcttgctctgtcacccaggctggagtacagtggtgcgatctcggctcactgcaacctccactttccaggttcaagcgattctcctgccttagcctcccaagtagctgggattacaggcacctgccaccacgccggctaatttttgtatttttagtagagtcgaggtttcaccatgttggctagggcttatatgtatatatatttgcagcatagatataatatactggcttattcctaggttacctcaagaaggatatacgtgacacgcgtaaacgtgaccacaactgactttgggaggccaaggcaggtgtatcacttgaggccaggagttcgagaccagcctgaccaacatggagaaaccctgtctctactaaaaatacaaaagttcttcttttttttgagacatagtttcactctgttgtccaggttggagtgcggtggtgccatcgtggctcaccgcagcctctgcctcccgggttcaagtgattctcctgcctcagcctcctgagtagctgggactacaggtgcccaccaccacacccggctaatttttgtatttttttggtaaccagttttcaccatgttggccaggctggtcttaaactcctgacctcaagtgatctgcccgcctcagcctctcaaagtgctaggattacaggcgggagccactacacctggactcattcttaagttataattaactataatatcaattcttattttggcatctccagagtttctgtcttgccttacacaactttacctgtttatgggacagacagctgtctaatttcattctcattgtgtcagaatgctacccaaattaaaattttcatcctattattttcagatccagagattacctcagaccagtttcatgttatttctggattatttcttttcccatggtctttgtaataggatcagtcaagccttaaaaagacacactaagctctctttaatagagaacaaagggccaggcacggtggctcacatctgtaggcgaggcggcagatctcttgagcctaggagttctagaccagcctgggcagcgtgttgagaccccgtatcttttttatttaaaaaaaaaaaggccagactcggtggttcacccctgtaatcccaacactttgggaggccgaggcaggcagatcacctgaggtcaagagtttgagactggcctggccaacatggtaaaaccccgtttctattaaaaatacaaaaactagctgggcgtggtgatgcacacctatcgtcccagctactcgggaggctgaggcaggagaatcggttgaacctgggaggcggaggttgcagtgagctgagactgcactccggcctgggcaacagagcgagactccatctcaaaaaaaaaaaaaaaaaacatacaaattatgtgactacaaatatgaacatatttctttctctttataaaatttttgaatcttggcctttgattatgaaatattctacttatgtaggtactacttatataaacttgaattcagttttcattaaaatgtttgttacttctgccttttttcctcttccctctgcttgtccattacttcatattttccagaggaacttacaagttctcagcaaatgataccttaaacatggttttagattttgccgtctatagtctgcattataatccggttaaaaggaaggtccatgttttatttttctgatcagtagtttgagaacgcatgagttgctgttaaataatctatgaattttttgtgtggaaatactgatcagttcttttttcttttttcttttttttttttttcccgagacatagtctccctctgtcacccaggctggagtgcagtggtgcgatctgggctcactacaacctccacctcccggtttcaagtgattctcctgtctcagcctcttgagtagctgggattataggagcatgccaccacatccagctaattttttgtatttttagtagagacgaggtttcaccatgttggccaggcttgtcttaaactcttggccccacagtgctgggattacaggtgtgagtcaccatgcccagccattcaattattttttcatatgaacattttttaaatataacaaatgctgaaggaatagttaaagaatctcttatgtaccccccatgtggattgaataattaatattttgccacgcttttgtatgtccgtatccatgtgtttattttgtgtgctgaggcatcatgatgttttacttctaaaaaattaaatatgtattttctaccaagaaaagcagctcctggccaggcgtggtggctcacgcctgtagtgccagcacttgggaggcagatacgggcagatcaccagatgtcaggagttccagaccagcctggccaacatagtgaaatcctgtctctactaaaaatacaaaaattaggcgtggtgatgcatgcctgtaatcccagctacttgggaggttgaggcttcaagaatcacttgaagccaggaggccgaggttgcagtgagtcgagatcgcaccactgcacaccagcctgaaggggtgggtttcccctccacagctgtgggcgtttctcgtcaggtggaaggactgacttggaaaagaaagagacacagaaacaaagtatagagaaagaaaaatgggcccaggggaccggcgttagggaggacctgcatacggaggacctctcaagaggaccggcctcttgagttcccttagtatttattgatcattatcgggcgtttctcggagagggggatgtggcaggacaatagggtaatagtggagagaaggtcagcaggaaaacgtgaacaaatgtctctgcatcataaacaaggtaaagaaaaaagtgctgtgcttttgatgtgcatatacataaacatctcaatgccttaaagagcagtgttgctgccagcatgtcccacctccagccctaaggcggttttcccctatctcagtagatggaatatacaatccagctttacacggagacattccattgcccagggaagagcaggagacagatgccttcctcttatctcaactgcaaagaggtcttccttttttactaatcctcctcagcacagaccctttacgggtgtcggactgggggacggtcaggtctttcccttcccgcggggccatatttcagactatcacatggggagaaaccttggacaatacctggctttcctaggcagaggtccctgcggccttctgtagtgtgttgtgtctctgggtacttgagattagggagtggtgatgactcttaaggagcatgctgccttcaagcatttgtttaacaaagcacatcctgcacagcccttaatccatttaacgctgagttgacacagcacatgtttcagtgagcacagggttgggggtagggttacagattaacagcatctcaaggcagaataatttttcttagtacagaacaaaatggagtctcttatgtctacttctttctacacagacacagtaacagtctgatctctctttcttttccccacacagcctgggcgacagagcaagactgtctcaaaaaaaaagggagctctcccatataacaaaataccgtttcacaccttagaagattaaccatgttgtcctaatattagactacccagtctatgttcacatttttccaattgtccccagaatgccttccatagttttttaaaattacagaatgtaatcagggttcaagctttgcatctggttgctcgccaccac[134 bp omitted]gcccggccagccagcatcttttgtcttcagctgcagaatggtgctgcaggtcttaccatatatgtgggtttaatctctgatttccgtatagcagctcattcctgtcatctcatttgctgaatgcccctgagctctgattaaaattctgcaggggataaacttccatttcatatgaaggtgtgtccagtcctttgttctcgtgactggacagtgcatgttcaactgttccttacacttttttttcagccaccatcctttattccttttgaataagggaatttgtaccattttctccttataattttaatggggttttgggaggaagcacttgttggttgatctattccttttcttagaaagatgagcattatttagccaggtatggtggtgcacacctgtaatcccagttactcaggaggctgaggctagagaattgcttgaacccaggaggcggaggctgcagtgagccgagatcgcaccactgcactccagcctggataacgagcgaaattccgtctcaaaaaaaaaaaaagaagaaagaaagatgaacattatttttcttccttagcatcccaggtagactttctaattttcatctttttcttctatttggcaattcttcattatttgttatacaacttgctaaattctgaaatggaaaggttatttttcaagagtactttcagctttgtggacccatgaatgttaattttctacctagatcacctcaagtagggttcccttctcataatttagttggaagcattaataatatagattattttcatattgggagatgggctaccagagttaatctcaaaaaattttattgctagtaatgggaaaattaacaaataaaagtgatagtaatataaaggtaaaatgaagggcttaccatatggcagccatggttctgggcactttatgaatttaactcctttgtgctatggttctttgtactccattttagaagaagcctgagaagatgatgcacagatagagaggcaccaggacttgagaggcaccaggacttgggaggcatgttgatccatctccaggaaagactgagaaaaagagcgttgaatataagaaaaaatacttcctctgttctcagatcgtatttgttttaaggccacacctttttgaagttttcagtttgaaacacaacctggactgaaatcatgagggaggttgtgtaggaaagaatcatcaagggacttagttgggagcttctctaccacagcttactccttatggtattaaccccctttaagtgtaaatgtctttggtttaaaacgtttgtacctcatctgttaccagagtgttcatactggagagaaaccctatgaatttactgaatgtgggggaactgttactcatatgttgcatttcgtcgaacgtgcaagtcatgctgaagagaaaccctgtgcttctaaggagtattgacaagcccttagctagatgacaatctcattgagaagcagaaaattcatgctggagagaaactagtgaaggtagcaatacttcattgaatattagaaaatttttctagagagaaagcattgaatatactgagtatgataacatttcctctcaaaccttatcccttactctgcatttgggagatcatacacagagaagccttataaatgtaagagatgtggaaatatcttcagccaaaagtaaatcctcactcatcaagaaatttttactggagagaaaccttgtgaatgtgggaaagcttccattcagatgtcacacctcagccagcagagaatttacagtggggaaaacccctttgcctgtaaggtatgtggaaaagtcttcagccacaaatcaaacctcactgagcatgagcattttcacacgagagagaaaccttttgaatgtaacgagtgtggaaaagcctttagccaaaagcagtatgtcattaaacatcagaacacccatactggcgagaagcttttcgaatgtaatgaatgtggaaaatcatttagccagaaggaaaacctccttacgcaccagaaaattcacactggagaaaaaccttttgagtgtaaagattgcgggaaagctttcattcagaagtcaaacctcatcagacaccagagaactcacacaggagagaagccctttgtatgtaaggagtgtggaaaaaccttcagtggcaaatccaaccttactgagcatgagaaaatccatattggagagaagccttttaaatgtagtgaatgtggaacagcctttggccagaagaagtacctcataaaacatcagaacattcacactggagagaaaccctatgaatgtaacgaatgtggaaaagccttctctcagcgaacatcacttattgtacatgtgaggattcattcaggtgataaaccttacgaatgcaatgtttgtggaaaagccttctctcagagctcatctctcactgtgcatgtgagaagccatacaggggagaagccctatggttgtaatgaatgtgggaaagctttctctcagttctcaacccttgctctgcatttgagaatacacacaggtaagaagccttatcagtgcagtgaatgtgggaaagctttcagccagaagtcacaccacattagacaccagaaaattcatactcactaaaaaccccatgaaagccttgaaagtgggaaagctttcattagaaatttgcacctcatcatgccccagaaataatccttctgaagcaaagcaccacgaatgaggttaactttaacaagtactaaaaacttaagggacaccagaaaatttgtactgaagagaaagacatgcatatgattaaaaccctgtgtccaacagagaaacctgcagcagagataatggtgaaagtttaggcacattttcactaaaagtgggaacagaaaatggaggcctgttttttattgctaccaccatagatctggagatcttcgccagtaacaagaaaaattaagttgtaaatattggaaaggaacagacaaaaatagatgacatggtcatctacaactaatattaagactcctgtggtattgattgagcagagcagaagagatttcaaaaaaagacctatgcatttattagaatttggaatatgatacaagtggcatcaggaaatgaggaaataatggaactattttttttaagtggaggtagtttgttctccaagggggaaaaatagaccatgaactatacacaaaagtgaatccagagattaaaaacagaaatatggaaaagctatgtactaaaatgcatatgaccttgggaatagggaaacattccttggaacaatttgagaaatacttagcggttctacttatgagtatgaatgctcaggaaatacgcactaggatatttactgtggcttgatttgtagtagccaaaaattagaaacaactgagaaagcccatcacgaacaatatgggaaattcttatgtaatactatatatctgtaaaatgcaacaaatgaaatccacatgtattaacagaaagatcccagaattgttgaggggggatcaagttgcagaatgatacagatagtacaatgacttttttgtaaatttgaattaaaagtttcctcataaaactcagtactatctattggtaatggatgcatatatgtatgtacatgtttttgaaacggattggaaggatacagaccaaactcttgatagtggtcacctgtgaagagtggagaagggaaaataatgagtgtgggaggtgggatgggtattggttaaaggggacttcagctttttatataaacatccacttctctttcaaaagacttcaagtaaatataagaagatactgattgattctggattgtggtatagggatatcttgtcttattttttgtacttttctgtatttttaaaatttctcaaaataggaatgggagtgaggatgggaatgctgtatctgtggaagtcatgttatactggattcatttccaattaaatactaaacattttatagaaaatatttctaaaattttatcacggatgaatggatggacttgctctctatgtaatatgaaattaatctattttattaaaatttaaaaggacagcacaatccaaatctgttttaattattttaacatggcatacacactatatcggggtccccagctccccccagctgcatggcaggaggtgagtggcgggtgagcgagcattgccacctgagctccacctcctgccagatcagcggtggcattagttctcataggagcgcgaaccctattgggaactgtgcatgtgaggaatccaggttgtgcgcttcttatgagaatgtaacgcctgatgatctgaggtggaacagtttcatcctgaaaacatcccatccccattcttctacccccacaaaccgtccgtggaaaaattgtcttccatgaaacaggtccctggtaccaaaaaggttggggaccgctgcactatatgatctctgtcttcgtatttctaacattttgcagaatgagcttagaaaactttaactttttctttgttcatacatgcacaggcttcatataattggtctttttcagttaggctgattttggaatgtcagttttcctctcctgcatatttccatgggaaacgtgtgcattaaatattaaatttttgataatatctttttttttttttttcccatcttgctctgttgcccaggccagaataccatggcaggatcttggctcactgcaatctcctctgcttactgggctcaagcagtcctccgacctcagcctcccaagtagctgggactacaggcacgcaccactatgctgtgccaattaaaaaaaaaaaattgtagcgatggggtctccgtatattgcccagattagtcccaaactcctggggtgaagtgattctccatggcctgttcaagtgctgccattacattacaggtatgagtcaccatgcccagctaattttatttttaaaaagagaaaacaacttcccataacttccacagttcagtgcattagataccaacacctgcgtgtctgtcttaacctgcgagctctgtcactcctcccactgctgttacagagagagaatgggacgggtatgagaaaaatggctcagaccctagacagagttctattttgtaaaccagcccttcatgaaaatttttttattctttgatcacattataatataaagaatattattaaaggttttcttgaataatggtgaatgtcaataatatacagcatttgagcttgattttgaaaccttaaaaaactcattaaatggcactgcatcactgtatcttttagcctttttggaggaattagatacttaaatgtctaaatgaatctgccctttatattatgatgtaccccatctttttctctgttttccctgtttgcacatatatttcacatttaaaggtgttgtctttatgatacagttggccctctgtatccatgggctctgcatccatttatcaacgaaccctggatggaaagtgtttaaaatatacaacaattttaaaaatacaaatgttaatatacaactatttggatagcatttacattgtattaggtattatgactaatctagagatgattctagctaggcatgtgccacacatctgtagtcccagccacttgggagggtgagctgggaggattgcttgagcccaggagtttgaggctgcagtcagccgtgattgcaccactatattgcagcctgggtgacagagaccctgtcgaaaacaaacaaaaccaggaggaaaaacacagggatggagacagatcagtgggaagagaattgagagtccacaaatgctatgggttgaatgtcccacccaaaactcaatgttgaaatttaattgccatggtaatggcatgaaaggttgagacccttaaaatggccatgaaggggctggtcgtggtggctcacacctgtaatctcagcactctgggaggccgaggcgggtggatcacctgaggtcacgagttcaataccagcctggccaacatggcaaaaccccgtctctactaaaattacaaaaattagccgggtgtagtggcacacacctgtaatcccagctacttgggaggctgaggcaggagaattgctccaacccaggaggcagaggtttgcagtgagccaggatcgtgctactgcactccagcctgggagacagaatgagactctatctcaaaaaaaaaaaaaaagatgtccatgaagtctccactttcatgagtaggattggtgtcatgataaaagggcaagttttgtccccacttgctgtctcttgtctttcctccatgggatgacataacaagaaggcccttgccagatgtcagtctctcagttgtggacttcccagcctccagaactgtgtaccaatatgttcttgttccttatacgttaaccagactcaggtattctgttataccaacacaaatcaattgatacactgtgggcaactgattttcaactagaatgccaaac[136 bp omitted]tggcaaaaccccgcctctactaaaaatacaaaaattagccagatgtggtagcgggggccagtaatcccagctacttgggaggttaaggcaggagaatcgcttgaacccaggaggcagaggttgcagtgagccgagatcgtgccgttgaactccggcctgggtgacaagagcaagactctgtattaaaaaaaaaaaaaaaaaaagtgttggggccgtgcgcagtggctcacgcctgtaatcccagcactttgtgaagcggaggcgggtggatcacctgaggtcaggagttcaagatcagcctggccaacatggtgaaaccctgtctactaaaaatacaaaaaattagctgggcgtggtagtggacacctatcatcccagtactttgggaggctgagctaggagaatcgcttgaacccaggaggtggaggttgcagtgagctgagattgtgccactgcactccagcctggcaagaagagtgtcaaaaaaaaaaaaaaaaaaaaaagctgggacaattgaggtacaaagatgaatttggactcttgcttcacaccgtatacaaaacttaactcaaaagtgtccaaagacctaaacataagagataaactcttggaggaaaacataggaacataggagtaaatcttcatgaccttagatttggcaacgattttgtaaatataataccaaatataataccaaagtataagcaggaacaacaaaagtagataaattggattttgtaaacatttaaaactttgtgtatcagacactatcaagaaactgaagttca[138 bp omitted]catggtgaaaccttgtctctactaaacataaaaattagccagatgtgatggtgcatgcctgtagtctcagctacttgggaggctgagacaagagaatgactgaacacgggaggtggaggttgcagtgaggcgagatcaagctattgaactccagcctgggtggcagagcgagactccatttcaaaaaaaataaagaacaacctattaaaaatgggcaaatttctgggcacggtggctcacacctgtaatcccatcactttagagggctgaggtgggtggatcacgagatcaagagctcgagaccagcctggccaacatggtgaaacccgtctctactaagaatacaaaaattaccaggcatggtggcacgtgcctctcatcccagctacttgggaggctgaggcaggagaatcacttgaacctgggaggcggaggttgcagtgagccaagatcatgccactgcaccccagcctgggtgatagagcaagactctgtctcgaaaaaataaataaaatgaaaattaaaatggacaaataaatagaatcattttttccaaaaaagatatacaggtgtccagcaagcacatgaaaagatgttcataaatcattgtgtaagtccagtatctgtttcttcttgacatggtcatctgctgattttcttttcccctgataattcatcacattttcccagttctttgtatttcaaataattttagattgcacccagtgcattttaagtattattttctaagactgtgttctgttcagattatctgagagtaaatgttgggtttttggttttggtctttttgtttgtttgtttttgaggcagaatttcgctcttgtcccccaggctggaggataatggggtgatctcagctcactgcaacctgtgcctcccgggttgaagtgactctcctgcctcagcctcttgagtagctgggatgacaggcgccctccaccacgcccggctaatttttgtatttttagtagagatggagttttgtcctgttggccaggctggtctcaaattcctgacttcaggtgatccacccacctcggccttccaaagtgtggggattacaagcgtgagccactgtgccaggcccaaactggataatttcaaatcctcagggaaggcagacttccattactggccaagatgggataagcacatttcagcatctctctcactgatttctatttaacaccccagagtgaatacaaaaagaaaccacctgaagattcagaaatacaagtaatagcaggcagatgtgaagggagttaaaaacgagaagaatggacacgatgaccatatgtttgctgggggattttcctcctttatcttttggctttggaaggagggaagtctcagagctgtgtgatgggttcagggagcataaattatgagagaaatgccttccttccagccagaggagtccaaaagaggacctggtgtgacagagtgagagaggggttcttttttttaattgagacagggtcttgctatgtcacccaggctgggggtgggggtggcacgatcttggctcagtgcagccttgaccccttgggctcaagtgattctcccacctcagcctcctgagtagctgggactagaggcatgagccaccacacccagctactttttaaaattttgtagagacaggggtctcactctgttgcccaggctgatttcaaactcctgaactccaggaatccaccctccttggcctcccaaagtgctgggattacaggtgtgaaccaccacacccagccttcccttttttctgtttttcttcttttctctactggccttgcaccaagaacagccccagtcattaggctgctctgccactgccgtagctgtcaaccaaaccaagaaaaaagacccatgggatcccatgtctgtgtgtctgagtggctgggggcagggggtgtcctctctttctctctctctattcttgccacctcaccacaaagtggagctaggtctggtcttgtgaaaacgtgcctgttgggggcgctgggagggcagctgaaactctgacagaaggccggatgcggtggctcacgcctgtaatcccgggaggccgaggcgagcgaatcagttgtcagaagttcaagaccagtgtggtcaaaatggtgaaacccttctctactaaaaatacaaaaattatctgggcgtggtggtgggtacctgtcatcccagctactcaggagactgaagtaggagaattgcttgaacctggaaggtggaggttgcagtgagcaagatcgtgcactccgacctgggcaacagagcaagaccctaaagaaaaagtttattaatttttttttaaaaaggaggctgggcacgctggctcacgcctgtaatttcagcactttgggaggccgaggccggtggatcacgaggccaagagatcgagaccatcctggcaaacatggtgaaaccccgtctctactaaaaatacaaaaattagccgggtgtggtggcatgcgcctgtaatcccagctactcgagaggctgaggcaggagaatcgcttgaacccgggaggtggaggttgcagtgagccgagatcgtgccactgccctccagcctggcgacagagcaagactacgtcttaaaaaaaaaaaaaaaaaaggaattgtcgaattctacgccttagattagaacgtgtctttttcatccactgtggttggtactcgataggcttgtatcttgttgacggtcagttttgggaccttttctcgtattatgtggtaattttcattgttgtgttttgttttcttgaatccctactgttcagtggctaggctagaaactgttggaaactcttaatttatcatgtgacgttttatttcttttgagtttagggatccacagcctgagacccggcgagcctcgctgcccttgcgagagccatggattcgcatttgcgcagagtcggggtctgttgctacgggtcccctgggctcctttgaatcgctttggcagctccctcggtttagagctacagggttttctccctcccctgagactctaacgcgtgcaccaactcgcgcctagagggcgtgtatgaccccagctcagttctaagccgaggggctgctgccggacattctagggtctgatctggcgggctcgaagggaggacagtcactgcgacccggaaagctccgcgcttacgacgcccacccagaaaatccggatcacatttcccgtggtccaccgcgcatctaggaggttacctgcgtccaggcggtgacttgcgagggaccacctttcccagggtccacggcgcatttaggtggtggcttgctctggactacatttcccagggtccaccgcggatctaggaggaggcttgagatgcagcctcccagcttcgaggctaccacctgcccgaattggtgctttggcagagtctctggtgcccgggtgaatgggttcagggtctcttaaggaccctccgttgacgatgcctcgagctatgacccaccctggctccgtccacggttgtcggggtcccgggctgcttttcttggagggctcggtgccggaggctactcttgagtcccggttccttcgcccagctgcgggcctcgggctactggatccgctgtctcggtttgggtgcggggccttggctcaggcggaacccgaccgggatcgccccgcgagatgcagtcgttgagggagtcaggagcccgggtctgggcggggaccccaaggctgctggagccggagctggcgcgggggagacgtgtgtgtgcgcgcgtgtgtctctctgtgcgcgcgtcagtgtgtgcacgcgtgtgtctgtgtttgcatctctgtgtgtgcacacgtgtgcctgtgtgtgcgtctctgcacgtgtctgtttgcctgtggtgcacacgcgtgtctgtgtgcgtctctgcgcgtgcctgtttgcctgtgtgcacacgtgtgtctgtgtgcgtctctgtgcgcacgtgtctgcgtgcgcgtgtctctgcacaagtgggtgtgcgcgcacgtctccgtgtgtgcgtgtgtgtgtgtgtggcgctagccctagccagctgtttgacgtgcatgattgtgacagcagcatgcatgattgtgacagcagcattaggtgtgtggccacttgtaaccacgtgaatggcttttcttgactgtgtgtaactcttgcttatgttattgactgtatgtgaatagttacagagggagtgtctgtattgccgaagtagtgagagcatgatggtgtgtcatgagcagttttagtgaaaggtaggaagcaaccagggtgtttttctttctacatttacacacaccactcaccaatgtgtggagtttttttctcccacactaaacagttcttcagcggacaccaactgggtgtgctacagttcagtgcaattccaactgtacctggagatagcagcagaacccatcggttaagggcttagtcccaaaatactgcccccgcttcagatgccaattgcaggtcccaggatgtgacctgtgcttctgacctactggctataaatcaaggttgccatgacccctcaagtttgagtattttgctagagtggttcacagaactctgagaaacactttatttatgtttacccatttattataaaggatattgacaaggatacagattaacagccagaaggaagagatgcatagggcaagatatgggggaggggtgcagagcttccatgccgtctctggctgcaccaccctccaggaacctttacgtgttcaataatccaggagccctccaaaccccttagtttagcagtttagtttagtttagtagtttagttttagtttagtttagtttagtttagtttagtagtttagttttagtttagtttagtttagtttagtttatcccagtgtaggggtgggttgcccctacacacctgtgggtgtttctcaaagagggggatgtgtcagggtcacaagacaattgtggggagagggtcagcagacaaacacgtgaacaaaggtctttgcatcatagacaatgtaaaggattaagtgctgtgcttttagatatgcatacacataaacatctcaatgctttacaaagcagtattgctgcccgcaggtcccacctccagccctaaggcggtttttccctatctcagtagatggagcatacaatcgggttttataccgagacattccattgcccagggacgggcaggagacagatgccttcctcttgtctcaactgcaagaggcattccttcctcttttactaatcctcctcagcacagaccctttacgggtgtcgggctgggggacggtcaggtctttcccttcccacgaggccatatttcagactatcacatggggagaaaccttggacaatacctggctttcctaggcagaggtccctgcggccttccacagtttttgtgtccctgggtacttgagattagggagtggtgatgactcttaaggagcatgctgccttcaagcatctgtttaacaaagcacatcttgcaccgcccttaatccatttaactctgagttgacacagcacatgtttcagagagcacagggttgggggtaaggtcacagaatctcaaggcagaagaatttttcttagtacataacaaaatggagtctcctatgtctacttctttctacacagacacagtaacaatctgatctctcttgcttttccccacacccagctacttgggaggctgaggcaggagaatctcttgaacctaggaggcagaggttgcagtgagccgagatcttcccactgcactttagcctgggtaacagggcgatgctcagtctgaaaaaaaaagataaagcaaagaaaaaagaaatttacagtttatgagcgaaaacaacatggctataatttccgcaatgtagacatttccagggtgtaataagatagttggttgaaagctggggataaggatatagaagatgttttgtgtctaccttgaggaggaagaggtgggacatgactgattagggataaaggagagtagagtgcagagtcttgggagacaggacctggctgtccaggcaagtgtggtgtgggcgatgttaatgactttcatgggatggacagatgccaaattaaagcagcatatgctaaagggttgttttttttttttgaataatgagggcaaacagtgacattttgcaaagataaaattctcccttttcctagacgaggtctctcctactctcacaccactcaacactcaataaagaacatttctgacaccagatgtgtgggttttttctccacacaccaagcagttccccattagacaccaactgtaggactacagttcagttcagttctgacaccacctacctggagatagcgtcagatcccacaggctaagggaccagtcccacaagatccttccacttcagatgtccatctcaagagccaggtggtgacctgtacttctgaccagctataaatttggggtttccacatcctctcctcaggtgtgattaatcttctaggatggctcacagatctcagggaaaccatttacttaacattagtccatttagtataaaggatattacagctgggcatggtgttgcccgtctgtaatcccagcactttcggaggctgaggtgggcagatcacttgagcccaggagtttgagaccagcctcggcaacatagcaaaaccctgtctttattaaaatacaaaacttagcttggtgtggtggtgcacgcctgtagtcctagtactagggagaccaaggtgggaggattgagcctaggaggttgaggttgtggtcagcccagatctcaccattgcactccagcctgggcaacagagcgagaccctgtctcaaa[136 bp omitted]aaaaatgcaaaagttagccgggcatggtggtgggcgcctgtattcccaggtactcaggaggctgaggcaggagaatcgcttgaacccgggaggcagaggttgcagtgagccgagatcgtgccactgcactccaacccagacaacagagagagagtgtgtctcaaaaaataaaaaaatgaaaataaataaaaaggatattacaaaggttttcgatgaagaggtacctagggcaacatatgtgggaagtggcattgggcttcaatgccctcaccccagcacatcatcctccaggaatccccacgtgttcagcaatctggaagctctctgaacccaatccttttgggttttcatggaggcttcattacataggcatgattgataacatcattggccattgtcagtcaactcaaccttcagctgctgtcccctccccagaggtcaaggggtggggctgaaagttccaaccctcatatcacattctgaggccatccaggagcccaccaagaagtcacctcattagaacatactatgctcctatcagccaggaaatcccaagggatttgagaactctgtgtcaggaactagggtcaaagaccagatattagaacaaatgatcctcctagtacccaagggttttaaggagctctagaccaggagctagggacagagaccaatatatgtgtatttctttttattttatattcccagctccccaaggttatccattttaaaagtctagtaagtttcctttacctctctccttgctcaaacatgcacatacatatattgagtgacttttattcccttttgcctttactagaattatatgtaatttttttttttagcttgtgtttctagggaagaccttatggatgtccttccaaattagtgcttactgatttgctgatttgagtagtacttggaaggacgtaatttttttttaattcaagctttttattatggatactttcaacattatatatgcagagagcctagtacagtgaatccacctttgacaattaacacatggcgagttttgcttcatctctatttccacttgattattttaaagaaaattccaggcatttcatctataaatatttcagtatgaaatatagttcttttaagaacttttcttaaaagacaattttcgtatcatcatcttaagaaaatgaacaattcctggccaggtgccatggctcatgcctgtaattccagcactttgggaggccaaagcaggaggatcacttgagtccaagagttagagaccagcatgagcaacatggcaaaacctcgtctctacaaaaaaatacaaaaaattagcctggcatggtggtgcgcacctgtagtcccagctacttgggaggctgaggtgagagcatcacctgaacctgggaatttgaggctgcagtgagccatgatttcaccactacatttcagcctgggtgacagagcaagatccctgtctcaaaaaaaaaaaaaaaaaaaaagaaaaagaaaaaagaaaaaaaagaaaaaagaccaatttcttaaaattacataatcagttgcagttgatttgttcaaattagaattagtttagagtttaaacaagatctacacgttgagcttagaggataaagctcttatatatctttttttttttttttttttttttttttttttgagacagagtctctctctgttgcccaggctggagtgcaatgacacgatctgggctcattgcaaccttcacctcccggattcaagcaattcttccccctcagcctcccgagtagctgggattacaggtgtatgccaccaggcctgactaatttttgtatttttgtattttttttgtttttgtttttgagacagagtcttgttctgtcacccaggctggagtgcagtggcgcgatatcggctcactgcaacctctttctcctgggtttaagcgattctcttgtctcggcctttcaagtagctgggactacaggcatgcactatcatgcccagctattttttgtatattcagtagaggcagggtttcaccttgttagccaggctggtctcaactcctgacctcaagtgatttgccaatcttggcctctcaaagttttgtatttttgaagagacggggtttcatcatgttggccaggctggtcttgaacttctgaccacagatgatctgtctgcctcagcctccaaagtgttgggattacgggcatgagccaccacacccagctgtctcttatatatcttttaatctattgacttcccttttttcttgctatttatgttttggagaaatcaaacactagatcatatagagtttccacatactgcctttgagtacacccccatggtactgattaacaaattagatgctctgtattttctctaaaatatctggtaattaactagagcagtggttctcaaccagttgtgttttttgtttctttgtttgcttgtttgttttctctagaagacatttggcaatgtttggagatatttttggttgtcacaactggaaggaaggatggtattgctggcacctattggctagaggccagggtgctgctaaacatcctatactgtacaggacagcctcctcccatcccaaagaattatctggtccaaagtgaaaatagtgtcagagttgagaaactgtgctctagagacttgatcaaattcaagttcagttattttggcaagatctgcttgtcactattttgtgatcagatttgttagtgggcttaagtgtcatcaatgtgatttatccattgtaaagtgattgccttttgcataatgtcatgcattcactgatgatcaatgcctagattcattatgttgttaggagttgcaaactgatcactttcttattgtgtctctctttcagccattactggaatccttttatttccattactggaatttccattactagaatccttttataaaaataaaatctgcccacatcaacaatctgattactcagagggatagcatgtgtaggaaagggaggataaatgcttgattctttccattcatattcattagttttcagaattacgaatttcagaatactgcattggtttcctagtttccaaaggtgattgcagcagattgtattttccaaagatggttgcaataataggcttgttccatatgttattctagaatcttgccattcccactttaagaggtggagtctaactcctctgcctttgaatctggattggtttattgtttataaccaatgctgtgtgactcccagggctcagtttaagaggcactgtggccttcacctcattagctgaaactccagtgtttgaaatcttgagccattatctaagaaggtccaagtgctctgagccgccatgctatgaggaagccaagtcacatggggaggctactagtccaagtctttgagtcctcccaccccaggtaccagacatgtgtgcaaagcaggcttcataggtttgcagccctcaggtatcaggttattcccagcctttgaatcctcctggttgaggccacagacatcaggagcaggggcaaactatctgctctgtgagctgtctgaattcctaacccacagaatcagtgagcacagtaaaatcattgtattatactactgagtttggagtggtgtattatacagcatcagtaactggtgaacaatgactgatatacccacacttgtttatgtcatattacacacacacacacacacacacacacacacttttttttctttagaggtggggtcttgctgtgttgtgcaggctggtcttgaactcctgaactcaagtgatcctcctatctcagcctcccaaagtgctgggattacagatgtgagccactgca[135 bp omitted]ggtgaaacctcatctctactaaaaatacaaaaattagctgggtgtggtggtacacgcctgtattcccagctacttgggaggctgagtcaggagaatcgcttgaacgcaagagtcggaggttgcagtgagctgatatggcagcattgcactccagcctggcaacagaatgagactctgtctcaaaataataataataataatatgagcaagaacaactgcacctaacaaataaaaactgatggtaatacataaggttacacaaatattcaaagacatatcatgattcgaaaaccacattaactgttctcttggctatcccataccaagtggagccaaaggctctgcacaggtttccaaacccgaatcatagccatgatagcaactgtggtcctctccctcctggttacctgctcacctgaagcaggtaagagcctgcttggcttcctagagaggcacttctgaggcaggagaataggaaattagtataaccaagccaggcgcagtggctcacgcctgtaatcccaacactttcagagtccgaggcaggcagatcatgaggtcaggagttccagactatcctggctaacagggtaaaaccccgtctcaactaaaaatacaaaaaataagccaggcatggtggcaggcgcctgtagtcccagctactcaggaggctgaggcaggagaatggcgtgaacccaggaggtggagcttgcagtgagctgagattccgccactgcactccagcctgggcgacagagcgagactccgtctcaaaacaaaaaggaaaagaaaattagcataaccaagggttaaggtggaagcaaaagaacagcaggtgcagcaagttctaggccaggttaagcagcacacaggccacatcctcactcctgtgatgacaacacagaagtctccagttcagcctctggccacgggccaatccttcatagggtgtaaccaattgaagacctcgaaaaggcacttatgggtgttatcaaattctttagcttaataactctaaagaacattgtaatctgggctcctgagccgcttgctctagcccactctggctctgtagagtggacttttgcttcaataaatctgcagtttcgttgcttctttcttctttcgtggctttgatcttttgttgcttcgtgtagtttgtttaattctttcttcagtgagccagaaacatggacaacttgcagtcaagaccttccatccagtaaaacttctacattctagaagtctcagtattgccaagagatgtcaaggcatcaaggggtcaaggttaaggcctaagattaaggctcaatgttatacgtgccctgacactgggggaaaacaaggagggctgaatggattaactgcaaattccctgccccaatgtactcctttgaataaggtgccctagcccaagcacttccttcagaggccaggcacagtacctgcttactgcgtagtagtgggcgtcaggttccagccagcctgcagaattattcaaacaggccattcacaccctccttcaagaaccaggggttacctcccatactcttggtactacaaagcctcctggaatagcctccacctgattactgtgttcctgagtgcaacacactgtaccccacatggtgtgctgggctctccttccctggggcgaaagtatgggtaattagcaaaccaatgttcatctcatctatccagtgttagctaccatgtgcttagcaataatctgcacttcctttctaattcttgagagacatccgggtcctctgctcctgggtggaggattttagaaaaaaggtcactcagaatgggcaggtgacttgaacgcctgcgggtccgacacagcaccaaacctcgccaaggccttcagaaaccaaaagtgcaactgccaggaaaatgactgcccgttccagtcacaggaccggctacacgacccaggcagagaccgagaaagaggctcaccaaaaaggccaacatgcaagaaactgccctccagagaacaggggacgtttgtccaaagacatacatgcacactcccattcacacacacagccccagcaatttttttcaggggctgcagcctgatccagagcagagcgcagtcagccttggcaaggcgcatacacaaatcgcgagcggatgctcacgtcacagagaccgccaccgttgcctggagatgagttcttcactctctgcgaaggaggagccttctgtagcagcgcatcggctcggggctaagtctagtcctcactggggcgtcgacgggatggtatccggaggccaggattcgcggaggttcgaccaggaggaagaaacctcaggcggagcgtctgggaagcagcgcagtatcccaggctcaggcctgcgtggacggtgtgccggtgagtctccccaaaagtcgtgcccttgcgatctccaggacaggtctgcttgtatgcccaagggctgctctctcaccccagggtcgttgtcgctcagagcagaacccagaggcttcaggggctgcctggagatgaatgttactgtgccactgcagtatgtctgggttgtgtctctttctcttatttctgttttcattctccgtctatcactctctaccagtttccgtccgtgtgtgcgcgggtgcgtgcgtgtgttgggatgcatgggcaatgaagggcggtttcttgtaccttggcctttcttctggtgagtctctcctcgcatctctgtctgggtcatgtggccgggtgtcattcgttttccaggcggttacagtttgggttcgtgaccggtgggcaacgtggggagctacatgagacacggcggggattaaatcagctcccaatcatgagcggcctcattgctagaatcaagacaactacaccccagcaaaggaaaaaattctcacaaaagctcatcataaacctgcttatgcaggtcgaggtgcccatcgacctcactcctctcaatcctctcgcgtgtgccctcactgagaaatctagccacagctcgatacagggacggaaaaggaagccggcaacgggatggggcaaacatctctgtggctccaacgctggccttcgtggccaagtcacccgtttggcactcctccccggatggccgtggtggtggcattgccgccaatcctgcctgggctctggcctctgctctgtcctccctcttgctctgtctgccctgtttctgagaggcctaggggcttgttagtctggctcaatgtcttcaacccagaagacttcccagtccatccgggagaaagttcctgggggtcggtgtcatgattgtttccttctccaaacctctttcagcatgattgggcaggtgtggtgatcctggagctctgggctttcatagctgtctgggacagggaagctttctgggtctctgtggccccgtggtcggtccaggaagagcgggaggcaacccgaccgttcctgacatttgccttctaggaaaggcggtgtggcatgccacctgcacttcctctctgattcttgagggccatcgggttcctctgctcctggggaaagagacttctagcactgaatcttctggctgccacggatgtcagggagccaaagggactgggttttgctgggtgcaggggaggtcgcgtcgggggtacctacccggtcgcggggtgggggtggggtgtagtttgtggaaagctctcggcccctctggcaggcatctctgaatgtggcttggattcgggcgcaggccctgtctcgcaggttttcaggtgcgcttggcttttcctcagctttgttgcggaggtctcccgtggcccccgggcgcacggctggacaccactgtccgtctcgccatcgccccctacggcctcaaagacacctgctcactccatctgcttttggggacgtcggtgccacgtgtggtcacactggctccatctcggactcgcctatgtctgtctttgcacgtgtcgcgggaagcagtgtcggtatgccggagcccccgggccttggagatgaaggcaggccactgctccacccaggaaggagggaggcagtgggctcgtgtgtcagttcattttccgccgacagcacgccttggggctctggggatctttctgtgccccagcgagacccttcccgcctcactgcattgcaaccccattctcgatcacccggtgggatccatcctcggagccgaagaggagtctgcacagcccagccggcaccctgaagctcctcctccactgggaacgaagcagaagaccgatcaaggaggtcctgacggcaggacccctacgggtccgaccctgggtctcccgcaggcccctctggcaatcctcttcccacccgccgcctcgggctgcgctgccttcgccgccgcaagcgccgccaccgccgccccggtccccgcaacctgccgcgtcgccgccattttttaaagggtccgcagcctgactctctggggcgaggggcgagtcggcctctccagtgcgcatgcgcgaggccggagccgccgctttggtcacagggatcaccaccgttgccccggggtgagtccctgagactgggccaagtaggaaccctctgtgaccgagcgtcagagtcggggctgagatcagtcctggccagggcattaacaggatggtctcggaggccgggattcgcggagggtcgaccagcagggagaagcctcaggaggaagaaacctcagacggatcgccggggaggcagcgcgggatcccagcctcaggtgtgtgcggacggtgtgcccgtgagtctccccaaaagtggtgcccttgtgatgtcgaggacaggtctgcccgtgtgcccgtgggctgctctctcaccggtgggtcgtagtcgcggagagcagaacccagcagcttcaggggctgcctggggctgggtgttacctgctgtatgtgtgtctgcgtttggggtgtgtgtgtgtgtgtctgtgtgtgtctgtgtgcccacttatgtctctctctgatatctctctctctcccttctcgctctttccatcgctctcttttactatctctgtccatctgtgcctgcgtgtttgctgggacacaggtgccctttgcaccagagggtggtttctcccacgtcagcctttcctgtggtcagcctctccccgggtctctacctgggttgtgtggcccgttggcagacgttttcccggcggttccagtttgggtttgtgaaggcctgggcaacatgggcacctgcgtcggacccgcagggattttcatcccctccctatcctgagcagcctctttgctgggatcaagacgaccacaccccagccaaggacaaagtcctcagaggggctcattgtccacccgcaggagggtgcccacagatcttgaagaagacgcttctcactcctcttgccctttgccctccttgagaaatgtagccacagctcgacacagggacggagaaggaagccggcaacgggatggggcaagcatctctgtggctcaaacgctggccatcttggccaagtcacccgtttggcactcctccccagatggccgtggtggtggcattgccgccaatcctgctggtctctggcctctgctctgtcctccctcttgctctgcctgccctgtttctgagaagcctaggggcttcttagtctggctcaatgtcttcaacccagaactcttcccagtccatccgggagaaagttcctgggggtcggtgtcatgactgtttccttccccaaacctctttcagcataattgggcaggtgtggtgatcctggagctctgggcttccatagctgtctgggacagggaagctttctgggtctctgttgccccgtggtcggtccaggaagagcgggaggcaacccgaccgttcctgacatttgccttctaggaaaggcggtgtggcatgccacctgcacttcctctctgattcttgagggccatcgggttcctctgctcctggggaaagaggcttctagcactgaatcttctggctgccacggatgtcaggaagccaaagggactgggttttgctgggtgcaagggtggtggggtcgggggtacctacccggtggcggggttggggtggggtgtagttcgtggaaacctctcagcccctctggcaggcatccctgaatgtggcttggattcctgcacaggccctgtctcgcaggttttcaggtgtgcttggcttttcctcagctttgtggtggaggtctccagtggccccccgggcgcacggctggacatcactgtccgtctcaccctcaccccctacggcctcaaagacacccgctcactccatctgctcttgggggacgtcggtgcgcgtccgtgtgaagagaccaccaaacaggctttgtgtgagcaacatggctgtttatttcacctcggtgcacgccggctgagtccgaaaagagagtcaatgaagggagatggattatcattagttcttgtaggttttgggttaggcggtgaagttaagagccatgttttgcgggcaggggtggatctcacaaagtatattctcaagggtgggaagaatttcaaagagccttcttaagggtgggggatattacggagtacattgatcagttagggtggggcaggaacaaatcacaatgatggaatgtaatcacttaaagctattttgacttcttttgtggatcttcagttacttcaggccatctgggtgtatacgtgcaagtcacaggagatgcgatggcttggcttgggctcagaggctggacattcctgccttcttatattaataagaaaaataaaatagtgttgaagtattggggcggtgaaaatttttggggggtggtatgaagagagaatgggcgatgtttctcagggctgcttcaagcgggattggggtggcgtgggaagctagagtgggagagattaagctgaagggagatcttgtggaaaggggtgatattgtggggatgttagaagaaacatttgtcatatagaattattggtgatgacctgcatacggttttggatggattgagaaactaaatggaaaaagagaaggagaaaaacaggtataaaaggtctaagaattgggaggacctaggacatctgattagagagtgcctaaggagattcagcatagtcctgccagcaaagattatttatttacttcaagagtttagagtggcagtttggggatggcaccaggagatatcagctgtgatggcttggagaaacagtgtaaactggcagtgtaaacaagaacagggcatgtatgagtagttgagaacggtgaataggagtatgactagagagaagatagtagggatggcaagtttttttggggcacagtctaagttggtctggtgtcaaatgagactggggcctaataaaaaggagcgtctatacaggagcttaaatgcgctgcaccttgcagcattctgacgacaggtctgacttctgagaagggaaagtggtaaaagtactttccagtcctttttaagttggtggctgagcttggtgaggtgtgtttttaaaagacctttagtcagttctacttttcttgaagacagaggaccataagggatataaaagttttactgaatactaagagcctgaaaaactgcttggctgatttgactactaaaggctggtctgttaccagactgtattgaggtgggaaggctaaactgaggaattatgtctgacagaagggaagaaatgactgtggtggccttctcagaccctgtaggaaaggcctctacttatctagtgaaagtgtctacttagactaagaggtattttagttatctgacttggggcatgttgagtaaagctaatttgccagtcctgggtgggggcaaatcttcaagcttgatgtgtagggaaaggagggggcctgaataattcctgaggagtagtagaatagcagatggaacactgagaagttatttccttggggatagatttccacaatggaaaggaaacgagaggttctaagaggagggatagtggcttgtactatagcatagcctgcctttgctggtgtgtggcgattaggcctggtggaactgccatcaataaatcaagtgtgatcagggtcaggaacaggaaagaaggaaatatggggaaatgggatgaatgtcaggtggatgagagagatagtcatgggggtcaggtgtggtatcaggaataatgtgggaggctggattgaagtctgtgccaggaacaatggtaattgtgggacttaacaaagagtgagtacagctgaaggagtcagggagcagaaagtatatgcatcaggtatgaggaagaaaatagattttggaagttatgagaaatgtagagagtgagttgagcatagtttgtgattttgagggcctctaaaagtattaaagcagtggcagccgctgcacacagacatgagggctaggctaaaacagtaaggtcaagttgtttggacagaaaggctacagggtgcagtcctggctcttgtgtaagaattctgacacacaaaccatgcctaggaaggaaaggagttgttgttttgtaagggattgaggtttggggagattaactggacacgatcagcagagagagcacgtgtgtttttccgagaattatgctgagataggtaacagatgaggatgaaatttgggcttgactgaagtaatggggtctgtctgtgaagccttgcggcagtacagcccaggtaatttgctgagcctgatgggtgtcagggtaagtccaagtgaaagggaagagaggctgggatgacgggtgcaaaggaataggaaagaaagcatgtttgagatccagaacagaataatgggtagcagagggaggtactgaggacaggagagtacatgggtttggcaccatggggtggataggcaaaacaatttggttgataaggcgcagattctggactaacttgtaagccttgtctggttttaggacaggtaaaatgggggaattgtaaggagagtttataggctttaaaaggccatgctgtagcaggtgagtgataacaggctttaatcctttcaaagcatgctgtgggatgggatcttgacattgagtggggtaaaagggtgattaggttttaatgagatggtaaggggtgcatgatcggtcaccaaggagggagtaggggtatcttatacttgtgggttaaggtggggggatacaagaggaggatgcaaaggaggctttggattgggaagaagggcggcaatgagatgcagctgtagtccaggaatagtcagggaagcagataattttgttaaaatatctcggcctaataagggaactgggcagagggggataactaaaaaagagtgcataaaagaatattgtctaagttggcaccagagctggggagttttaagaggtttagaagcctggctgtcaatacctacaacagttatggaggcaagggaaacaggcctttgaaaagaaagtaatgtggagtgggtagcctccgtattgattaagaaggggacggacttaccctccactgtgagagttaccaaaatctcggcgtctgtgatggtctacggggcttccgaggagatcaggcagcatcaatcttcagccgctaagccaaggagtcagtcagagagctttgggccagagttccaggggctctgggagtggctgccaggtgagttgaacagtccgatttccagtgggttcctgcacagatgggacatggcttaggaggaatcctggactgcaggcattccttggcctggtggtcagatttctggcacttatagcaagctcctgggggaggaggttctggaggaacgcctggcggctgcggttcaagcgtttggaagttcttgtgtgctggagatgtagctggggtttgtctcacagtggaggcaaggaattgcaactttttttttattattgtacaccttgaaggtgaggttaattaagtcctgttgtggggtttgagggccagattccaatttttggagttttatttaatgtcgggagcagtttgggtaataaaatgtatattgagaataagatggccttttgaccttttagggtttagggctgtaaagcgtctcagggttgctgccgaacgagccatgaactgggctgtgtttttatatttgatgaaaaagagcctaaacgcttctgatttgggataaagagaaaggagtattaaccttgactatgcctttggctccagccaccttttaaacagtaaattgctgggcaggtggagagggctagtaacagaacgaaagtgtaagctggaccaggtgtgaggagggaaggcgataaaaagattacaggatggaggagcagaggctgaggaagaattaggacctagctcggcctggcgaggaggggagaggtcagatgggtctgtagaaaaggaagattacaaagactcagcgacacttggggttgggactgaggggacaggtgggagggaaagaaagaagatttgggagcagttgcactgggcacagagactaggaagggactgatgtgtgaaagaatgcctggacatcaggcctcctcagaccatttgcccattctatgacaagaattatttagatcttgtagggtggaaagattgaaagtgccatttttgggctatttggaactactgtggagtttgtattggggtcaggcagcattgcagaagaaaataagacgcttagattttaggtcaggtgagagttgcagaggtttataagttcttaagaatacaggctaagggagaaaaaggaggaatggagggtggaaggttgcccatagtgagggaggcaagcccagagcaaagagagcatagagagagggagggaaggggttcaggggttctcaccctccagaaaagtgggaaaggggttgtagcgtggaaataagggattggggattcttgccacctagaaaagtgggacttgctgctaagggtgaaggagaaggggttgaggggtacttgcccctaccccagaaaagcagagaaggggtagagacacagaaggggttggggtacttgcccgtcccctagaaaagtgggacttgccactaagggtgaaggagaaggggttgaggggttcttgctcctgccccagaagagcagagaaggggtagagacacggagagaaggggttggggtacttgcccctcccccagaaaagcgggacttgccgctaagggtgaaggaccaaggcaggcgtccctgcatggtctgacacctttgaaacatgggtgaataatcagagaggtgggcctgcaatgattaaacaccaagggaagcctgccttcccagtccgtgaccggcgccggagttttgggtccacggataaaacgtgtctcctttgtatctaatagaaaatgaaaggaattgaaattaagagatgggagagattgaagtgtggtgccaagattgaaaggagaaagaggttggagggatagtgagagaagttggagagtaaaaagaggccgcttaccggaagtgaaattggtgagatgtttcttgggctggtgagtctgaggacctgagctcataggtggatctctctcacggagcaaagagcaggaggatgggggattgatctcctaagggaggtcccccgatccgagtcacggcaccaaatttcatgcccgtccatgtgaagagaccaccaaacaggctttgtgtgagcaacatggctgtttatttcaactgggtgcaggtgggctgagtctgaaaagagagtcagcaaagggagatggattaccattagttcttataggttttgggataggtggtgaagttgatagcaatgttttgcggacaggggtcgatctcacaaagtacattctcaagggtggggagaattacaaagaaacatcttaagggtgggggagattacaaagtacattgatcagatagggtggggaaggaacaaatcacaatggtagaatgtcatcagttaaggctattttgatgtcttttgtggatcttcagttacttcagaccatctggtgtatatgttcaagtcacaggggatgcgatggattggcttgggctcagaggcctgacactggccttccaggcaaagtcacccatttggcactcctccctggatggccctggttgtgggattgccgccagtcatgcctgggctctggcctctgctctgtcctccctcttgctctgcctgccctgtttctgagaagcctaggggcttcttggtctgcctcaatgtcttcaacccaaaagacttcccagtccatccgggagaaagttcctgggggtcggtgtcatgattgtttccctctccaaacctctttaagcatgattgggcaggtgtggtgatcctggagctctgggcttctatagctgtctgggacagggaagctttctgggtctctgtggcccaagtgatggctgcgtggtccgtccaggaagagcgggaggcaacccgaccattcctgacatttgccttctaggaaaggcagtgtggcatgccacctgcacttcctctctgattcttgagggccatcgggttcctctgctcctgggaaaagaggcttctagcgctgaatcttctggctgccacggatgtcagggagccaaagggactgggttttgctgggtgcaggggaggtggcatcacgggtacgtacccggtggcagggtgggggtgggagtggggtgaaatttgtggaaacctctcggcccctctggcaggcatccctgaatgtggcttggattcggtcgcaggccctgtctcgcaagttttcagctgcgcttggcttttcttcagctttgtggccgaggtctcccgtggcccacgggcgcacggctggacatcattgtccgtctcgccacgccccctacggcctcaaagacacccgctcactccatccgctcttgggcgacgtcagtgccacgggtggtcacactggctccatctcagactcgcctctgtctgtctttgcatgtgtcgtggaaagcagtgtcgggatgcccgagcccccgggccttggagatgaaggcaggccactgctccacccaggaaggagggaggcagtgggctcgtgggtcagttcattttccgccgacagcacgccttgcggccctggggatctttctgtgccccagcgagacccttcccgcctcactgcattgcaaccccattcccgatcacccggtgggatccatagtcggatctgaagaggagtccgcacagccaagccggcaccctgaagctcctcctccaccgggaaccgaagcagaagaccgatcaaggaggtcctgaggacaggactcctactggtccgaccctgggtctcccgcaggcccctctggcagtcctcttcccacccgccgccgcaagcgcgccaccgccgccaccgccgccccggtcccagcaacctgccgtgtcgccgccattttttaaagggtccgcagcctgcctctcccgagcgaggggagagtcggcctctccagtgcgcatgcgcgaggcccgagccgccacttgcgtcagtgatcaccaccgttgcaccggggtggattcctgagactgggccaagtaggagacctgtgtgaccgtgcgtcagagtcgtgcctgagaccagtcctggccagggcgttaacaggatggtctccggaggccgggattcgcggagggtcgaccagcagggagaagcctcaggaggaagaaacctcagacggatcgccggggaggcagcgcgggatcccagcctcaggtgtgcgcggacggtgtgcccgtgagtctccccaaaagtggtgcccttgtgatgtcgaggacaggtctgcccgtgtgcccgtgggctgctctttcacctctgggttgtagtcgcggagagcagaacccggcagcttcaggggctgcctggggctgggtgttacctgctgtatgtgtttgtgcttaggggtgtgtgtgtgtgtgtgtgtctgtgtgtctgtgtgcccacttatgtctctctctgatatctctctctctcgcttctcactctttccgtcgctctctgttactatctctgtccgtctgtgcgtgcgtgtttgctgggacacaggtgccctttgcgccggagggtggtttcttgcacatcagcctttcttgtggtcagcctctccccgggtctcttcctgcgtcgtgtggcccgttggcagtcgttttcccggcggttccagtttgggtttgtgaaggcctgggcaacgtgggcacctgcgtcggacccgcaggggttttcatcccctccctatcctgagcagcctctttgctgggatccagacgaacacaccccaaccaaggacgaaggactcagaggggctcattgtccaccagcaggagggtgcccacagatcttgaagaagacgcttctcactcctcttgccctttgccctccttgagaaatctagccacggctcgacacagagacggaggaggaagccggcaacgggatggggcaaacatctctgtgggtcagacgctggccttcgtggccaagtcaccggtttggcactcctccgcggatggccgtggtggtggcattgcggccaatcctgcctgggctctggcctctgctctgtcctccctcttgctccgcctgccctatttctgagaagcctaggggcttcttagtctggctcaatgtcttcaacccagaactcttcccagtacatccgggagaaagttcctgggggtcggtgtcatgattgtttccctctccaaacctctttcagcatgattgggcaggtgtggtgatcctggagctatgggcttccatagctgtctgggacggggaagctttctgagtctccgtgacccaagtgatggctgcgtggccggtccaggaagagcgggaggtaacccgaccgttcctgacatttgccttctaggaaaggtggtgtggcatgccacctgcacttcctctctgattcttgagggccatcgggttcctctgctcctggggaaggaggcttctagcgctgaatcttctggctgccatggatgtcagggagccaaagggactgggttttgctgggtgcaggggaggtggcgtcatgggtacctaccccgtggcggggtgggggtgggagtggggtgaaatttgtggaaacctctcggcccctctggcaggcatccctgaatgtggcttggattcggacgcgggccctgtctcgcaggttttcagctgcccttggcttttcttcagctttgtggctgacgtctcccgtggcccacgggcgcacgcctggacatcactgtccgtctcgtcgtcgccccctacggcctcaaagacacacgctgcctgcatgtgctcttgggggacgacagtgccacatgtggacacactggctccagctcggactcgcctctgtctctctttgcccgtgtcgccggaagccgcgtcgggatgccggagccctcgggccttggagatgaaggcaggcccctgctcctgccaggaaggagggaggcagcgggctcatgggtcggtgcctttgcagccaacagcacgccttgcggccctggggatcttcctgtgccccggcgagaccctttccgcctcactgcattggaaccccattcccgatcacccgctgggatccatcatcggaccccaagaggagtccgcgcagcccagccggcaccccgaagctcctccttcagcgggaaccgaagcagaagagcgatcaaggaggtcctcaccacaggactcctatgggtccgaccctgggtctcccgcaggcccctctggcagtcctcttcccacccgccgcctcgggctgcgccttcgccgccgccgccgcaacctccagcaccgccgccccaggccccgcagccgccgcgtcgccgccattttttaaagggtccgcagcctgactctgcgaagtaagggcgggtggagcgggggagtcggcctcgccagcgcgcatgcgcaaggcccgagccgccgcttgggtcacagtgaaagccaccgttgcccggggatgggtccctgacacttggggaagtaggagccctgtgtgatcgtgcgtctgagtctgggctgagaccagtcctggccagggcagttaccaggacggtctccggaggccgggattcgcggagggtccagcagcaggaagaaaccccaggaggaagaaacctcagacagatcgccggcgaggcagcgcgggatcccagcctcaggcgtgcgcggacggtgtgcgggtgagtctccccaaaagtggagcccttgtgatgacgagcacaggtccgcctgcgtgcccgtgggctgctctctcaccggtggctctcagtcgcggagagcagaacccggcagcttcaggggctgcctgcgggtgggtgttccctgctgtacgtgtgtgttcgtcatgggtgtgtgtgtgtgtgtgttggggggggtgcgtctgtgtgtgtgcgcgcgcagtgcctgtctgtgtgtcgacttctgtctctctctcacgtctctctctctctctctctctctctctctccctctccctctctcccttctcgctctttccgtggccctctctttctgtctctgtccgtctgtgtgtgcgtgcgcctcgggacacatgtgccctgtgcgccggagggtgggtttcttgcacgtcggcctttcttctggtcagcctctccccgcgtctctgcctgggtcgtgtggccggttggcagtcgtcgtcccggcggttccagtttgggggtctgtgaaggcctgggcaacgtgggcatcggcgtcggacccgcaggggttttcatcccctccccatccggagcagcctctttgctaggctggatccagacgagcgctccccaaccaaggacaacggcctcccaggcgctcatcgtccacccgcaggagggtgcccgcagagcttcaagaaggtggttgtcacgcctgtcgccctctgccctcatcgagaaatgtagccacagctcgacgcagggacggagaaggaagccggcaaggggatggggcaagcatgtctgtctctcaaaggctggccttcctggctgagtcacccgtttgacactcctccccggatgccggtggtggtggcatggcccccccgtatcctgcctgggctctggcctctgctctgacctccctcttgctgtgtctgccccgtctctgagaagcctggcggcttcttagtgtggctcagtgtcttccacaaagaagacttccccgtccatcagggagaaacctcgtggcggtccgcgtcatgcttgtttccctctccacacctctttctggatgattgggcagctgtggtgatcctggagctctgggcttccatacctgtgtgggacagggaagctctctcggtctccatggcccaagtgatggctgcacgctcggtccaggaagaggcggaggcaagcccaccgctcctgacattggccttctaggaaaggcggtgttgcatcccacctgcacttcctctctgattcttgagagccaaccgcttcctccgctcctggggaaagtgccttctagcaccgaatgttttggctgccacggatgtcagggagccaacgggactgggttttggctgggtgcaggggaggttgcgtcaggggtacctagccggcggcgggctgggggtggggtgtactttgtccaaacctctcggctcctctggcgggcctccctgaacgtggcgtggactcgcgcacaggccctgtctcgcaggttttcaggtgcgcttggcttttcctccgctttgtggggcaggtctccagtggccccccgggcgcacgcctggacatcactgtccgtctcgtcgtcgccccctacggcctcaaagacacacgctgcctgcatgtgctcttgggggacgacagtgccacatgtggacacactggctccagctcggactcgcctctgtctctctttgcccgtgtcgccggaagccgcctcgggttgccggagccctcgggccttggagatgaaggcaggcccctgctcctgccaggaaggagggaggcagtgggctcatgggtcggtgcctttgcagccgacagcacgccttgcggccctggggatcttcctgtgccccggcgagaccctttccgcctcactgcattggaaccccattcccgatcacccgctgggatccatcatcggaccccaagaggagtccgcgcagcccagccggcaccccgaagctcctccttcagcgggaaccgaagcagaagagcgttcaaggaggtcctcaccacaggactcctatgggtccgaccctgggtctcccgcaggcccctctggcagtcctcttcccacccgccgcctcgggctgcgccttcgccgccgccgccgcaacctccagcaccgccgccccaggccccgcagccgccgcgtcgccgccattttttaaagggtccgcagcctgactctgcggagtaagggggggtggagcgggggagtcggcctcgccagcgcgcatgcgcgaggcccgagccgccgcttgggtcacagtgaaagccaccgttgcccggggatgggtccctgacacttggggaagtaggagccctgtgtgatcgtgcgtctgagtctgggctgagaccagtcctggccagggcagttaccaggacggtctccggaggccgggattcgcggagggtccagcagcaggaagaaaccccaggaggaagaaacctcagacagatcgccggcgaggcagcgcgggatcccagcctcaggcgtgcgcggacggtgtgcgggtgagtctccccaaaagtggagcccttgtgatgacgagcacaggtccgcctgcgtgcccgtgggcggctctctcaccgctggctctcagtcgcggagagcagaacccggcagcttcaggggctgcctgcgggagggtgttccctgctgtacgtgtgtgttcgtcatgggtgtgtgtgtttgtgtgttggggggggtgcgtctgtgtgtgtgcgcgcgcagtgcctgtctgtgtgcggacttctgtctctctctcaggtctctctctctctctctctctcccttctcgctctttccgtggccctctctttctgtctctgtccgtctgtgtgtgcgtgcgcctcgggacacatgtgccctgtgcgccggagggtgggtttcttgcacgtcggcctttcttctggtcagcctctccccgcgtctctgcctgggtcgtgtggccggttggcagtcgtcgtcccggcggttccagtttgggggtctgtgaaggcctgggcaacgtgggcatcggcgtcggacccgcaggggttttcatcccctccccatccggagcagcctctttgctaggctggatccagacgagcgctccccaaccaaggacaacggcctcccaggcgctcatcgtccacccgcaggagggtgcccgcagagcttcaagaaggtggttgtcacgcctgtcgccctctgccctcatcgagaaatgtagccacagctcgacgcagggacggagaaggaagccggcaaggggatggggcaagcatgtctgtctctcaaaggctggccttcctggccgagtcacccgtttgacactcctccccggatgccggtggtggtggcatggcccccccgtatcctgcctgggctctggcctctgctctgacctccctcttgctgtgtctgccccgtctctgagaagcctggcggcttcttagtgtggctcagtgtcttccacaaagaagacttccccgtccatcagggagaaacctcgtggcggtccgcgtcatgcttgtttccctctccacacctctttctggatgattgggcagctgtggtgatcctggagctctgggcttccatacctgtgtgggacagggaagctctctcggtctccatggcccaagtgatggctgcacgctcggtccaggaagaggcggaggcaagcccaccgctcctgacattggccttctaggaaaggcggtgttgcatcccacctgcacttcctctctgattcttgagggccaaccgcttcctccgctcctggggaaagtgccttctagcaccgaatcttttggctgccacggatgtcagggagccaacgggactgggttttggctgggtgcaggggaggttgcgtcaggggaacctagccggcggcgggctgggggtggggtgtactttgtccaaacctctcggctcctctggcgggcctccctgaacgtggcgtggactcgcgcacaggccctgtctcgcaggttttcaggtgcgcttggcttttcctccgctttgtggggcaggtctccagtggccccccgggcgcacgcctggacatcactgtccgtctcgtcgtcgccccctacggcctcaaagacacacgctgcctgcatgtgctcttgggggacgacagtgccacatgtggacacactggctccagctcggactcgcctctgtctctctttgcccgtgtcgccggaagccgcctcgggttgccggagccctcgggccttggagatgaaggcaggcccctgctcctgccaggaaggagggaggcagtgggctcatgggtcggtgcctttgcagccgacagcacgccttgcggccctggggatcttcctgtgccccggcgagaccctttccgcctcactgcattggaaccccattcccgatcacacgctgggatccatcatcggaccccaagaggagtccgcgcagcccagccggcaccccgaagctcctccttcagtgggaaccgaagcagaagagcgatcaaggaggtcctcaccacaggactcatgggtccgaccatgggtctcccgcaggcccctctggcagtcctcttcccacccgccgcctcgggctgcgccttcgccgccgccgccgcaacctccagcaccgccgccccaggccccgcagccgccgcgtcgccgccattttttaaagggtccgcagcctgactctgcggagtaagggggggtggagcgggggagtcggcctcgccagcgcgcatgcgcgaggcccgagccgccgcttgggtcacagtgaaagccaccgttgcccggggatgggtccctgacacttggggaagtaggagccctgtgtgatcgtgcgtctgagtctgggctgagaccagtcctggccagggcagttaccaggacggtctccggaggccgggattcgcggagggtccagcagcaggaagaaaccccaggaggaagaaacctcagacagatcgccggcgaggcagcgcgggatcccagcctcaggcgtgcgcggacggtgtgcgggtgagtctccccaaaagtggagcccttgtgatgacgagcacaggtccgcctgcgtgcccgtgggctgctctctcaccggtggctctcagtcgcggagagcagaacccggcagcttcaggggctgcctgcgggagggtgttccctgctgtacgtgtgtgttcgtcatgggtgtgtgtgtgtgtgtgttggggggggtgcgtctgtgtgtgtgtctgtgtgtgtgcgcgcgcagtgcctgtctgtgtgccgacttctgtctctctctcacgtctctctctctctctctctctctctctgtctctctctctctctctctctctcccttctcgctctttccgtggccctctctttctgtctctgtccgtctgtgtgtgcgtgcgcctcgggacacatgtgccctgtgcgccggagggtgggtttcttgcacgtcggcctttcttctggtcagcctctccccgcgtctctgcctgggtcgtgtggccggttggcagtcgtcgtcccggcggttccagtttgggggtctgtgaaggcctgggcaacgtgggcatcggcgtcggacccgcaggggttttcatcccctccccatccggagcagcctctttgctaggctggatccagacgagcgctccccaaccaaggacaacggcctcccaggcgctcatcgtccacccgcaggagggtgcccgcagagcttcaagaaggtggttgtcacgcctgtcgccctctgccctcatcgagaaatgtagccacagctcgacgcagggacggagaaggaagccggcaaggggatggggcaagcatgtctgtctctcaaaggctggccttcctggccgagtcacccgtttgacactcctccccggatgccggtggtggtggcatggcccccccgtatcctgcctgggctctggcctctgctctcacctccctcttgctgtgtctgccccgtctctgagaagcctggcggcttcttagtgtggctcagtgtcttccacaaagaagacttccccgtccatcagggagaaacctcgtggcggtccgcgtcatgattgtttccctctccacacctctttctggatgattgggcagctgtggtgatcctggagctctgggcttccatacctgtgtgggacagggaagctctctcggtctccatggcccaagtgatggctgcacgctcggtccaggaagaggcggaggcaagcccaccgctcctgacattggccttctaggaaaggcggtgttgcatcccacctgcacttcctctctgattcttgagggccaaccgcttcctccgctcctggggaaagtgccttctagcaccgaatgttttggctgccacggatgtcagggagccaacgggactgggttttggctgggtgcaggggaggttgcgtcaggggtacctagccggcggcgggctgggggtggggtgtactttgtccaaacctctcggctcctctggcgggcctccctgaacgtggcgtggactcgcgcacaggccctgtctcgcaggttttcaggtgcgcttggcttttcctccgctttgtggggcaggtctccagtggccccccgggcgcacgcctggacatcactgtccgtctcgtcgtcgccccctacggcctcaaagacacacgctgcctgcatgtgctcttgggggacgacagtgccacatgtggacacactggctccagctcggactcgcctctgtctctctttgcccgtgtcgccggaagccgcctcgggttgccggagccctcgggccttggagatgaaggcaggcccctgctcctgccaggaaggagggaggcagtgggctcatgggtcggtgcctttgcagccgacagcacgccttgcggccctggggatcttcctgtgccccggcgagaccctttccgcctcactgcattggaaccccattcccgatcacccgctgggatccatcatcggaccccaagaggagtccgcgcagcccagccggcaccccgaagctcctccttcagtgggaaccgaagcagaagagcgatcaaggaggtcctcaccacaggactcctatgggtccgaccctgggtctcccgcaggcccctctggcagtcctcttcccacccgccgcctcgggctgcgccttcgccgccgccgccgcaacctccagcaccgccgccccaggccccgcagccgccgcgtcgccgccattttttaaagggtccgcagcctgactctgcggagtaagggggggtggagcgggggagtcggcctcgccagcgcgcatgcgcgaggcccgagccgccgcttgggtcacagtgaaagccaccgttgcccggggatgggtccctgacacttggggaagtaggagccctgtgtgatcgtgcgtctgagtctgggctgagaccagtcctggccagggcagttaccaggacggtctccggaggccgggattcgcggagggtccagcagcaggaagaaaccccaggaggaagaaacctcagacagatcgccggcgaggcagcgcgggatcccagcctcaggcgtgcgcggacggtgtgcgggtgagtctccccaaaagtggagcccttgtgatgacgagcacaggtccgcctgcgtgcccgtgggctgctctctcaccggtggctctcagtcgcggagagcagaacccggcagcttcaggggctgcctgcgggagggtgttccctgctgtacgtgtgtgttcgtcatgggtgtgtgtgtgtgtgtgttggggggggtgcgtctgtgtgtgtgtctgtgtgtgtgcgcgcgcagtgcctgtctgtgtgccgacttctgtctctctctcacgtctctctctctctctctctctctctctctctctctctctctctccctctccctctccctctctcccttctcgctctttccgtggccctctctttctgtctctgtccgtctgtgtgtgcgtgcgcctcgggacacatgtgccctgtgcgccggagggtgggtttcttgcacgtcggcctttcttctggtcagcctctccccgcgtctctgtctgggtcgtgtggccggttggcagtcgtcgtcccggcggttccagtttgggggtctgtgaaggcctgggcaacgtgggcatcggcgtcggacccgcaggggttttcatcccctccccatccggagcagcctctttgctaggctggatccagacgagcgctccccaaccaaggacaacggcctcccaggcgctcatcgtccacccgcaggagggtgcccgcagagcttcaagaaggtggttgtcacgcctgtcgccctctgccctcatcgagaaatgtagccacagctcgacgcagggacggagaaggaagccggcaaggggatggggcaagcatgtctgtctctcaaaggctggccttcctggccgagtcacccgtttgacactcctccccggatgccggtggtggtggcatggcccccccgtatcctgcctgggctctggcctctgctctgacctccctcttgctgtgtctgccccgtctctgagaagcctggcggcttcttagtgtggctcagtgtcttccacaaagaagacttccccgtccatcagggagaaacctcgtggcggtccgcgtcatgcttgtttccctctccacacctctttctggatgattgggcagctgtggtgatcctggagctctgggcttccatacctgtgtgggacagggaagctctctcggtctccatggcccaagtgatggctgcacgctcggtccaggaagaggcggaggcaagcccaccgctcctgacattggccttctaggaaaggcggtgttgcatcccacctgcacttcctctctgattcttgagggccaaccgcttcctccgctcctggggaaagtgccttctagcaccgaatcttttggctgccacggatgtcagggagccaacgggactgggttttggctgggtgcaggggaggttgcgtcaggggtacctagccggcggcgggctgggggtggggtgtactttgtccaaacctctcggctcctctggcgggcctccctgaacgtggcgtggactcgcgcacaggccctgtctcgcaggttttcaggtgcgcttggcttttcctccgctttgtggggcaggtctccagtggccccccgggcgcacgcctggacatcactgtccgtctcgtcgtcgccccctacggcctcaaagacacacgctgcctgcatgtgctcttgggggacgacagtgccacatgtggacacgctggctccagctcggactcgcctctgtctctctttgcccgtgtcgccggaagccgcctcgggttgccggagccctcgggccttggagatgaaggcaggcccctgctcctgccaggaaggagggaggcagtgggctcatgggtcggtgcctttgcagccgacagcacgccttgcggccctggggatcttcctgtgccccggcgagaccctttccgcctcactgcattggaaccccattcccgatcacccgctgggatccatcatcggaccccaagaggagtccgcgcagcccagccggcaccccgaagctcctccttcagtgggaaccgaagcagaagagcgatcaaggaggtcctcaccacaggactcatgggtccgaccatgggtctcccgcaggcccctctggcagtcctctccccacccgccgcctcgggctgcgccttcgccgccgccgccgcaacctccagcaccgccgccccaggccccgcagccgccgcgtcgccgccattttttaaagggtccgcagcctgactctgcggagtaagggggggtggagcgggggagtcggcctcgccagcgcgcatgcgcgaggcccgagccgccgcttgggtcacagtgaaagccaccgttgcccggggatgggtccctgacacttggggaagtaggagccctgtgtgatcgtacgtctgagtctgggctgagaccagtcctggccagggcagttaccaggacggtctccggaggccgggattcgcggagggtccagcagcaggaagaaaccccaggaggaagaaacctcagacagatcgccggcgaggcagcgcgggatcccagcctcaggcgtgcgcggacggtgtgcgggtgagtctccccaaaagtggagcccttgtgatgacgagcacaggtccgcctgcgtgcccgtgggctgctctctcaccggtggctctcagtcgcggagagcagaacccggcagcttcaggggctgcctgcgggagggtgttccctgctgtacgtgtgtgttcgtcatgggtgtgtgtgtgtgtgtgttgggggggtgcgtctgtgtgtgtgtctgtgtgtgtgcgcgcgcagtgcctgtctgtgtgccgacttctgtctctctctcacgtctctctctctctctctctctctctctctctctctctctctgtctcccttctcgctctttccgtggccctctctttctgtctctgtccgtctgtgtgtgcgtgcgcctcgggacacatgtgccctgtgcgccggagggtgggtttcttgcacgtcggcctttcttctggtcagcctctccccgcgtctctgcctgggtcgtgtggccggttggcagtcgtcgtcccggcggttccagtttgggggtctgtgaaggcctgggcaacgtgggcatcggcgtcggacccgcaggggttttcatcccctccccatccggagcagcctctttgctaggctggatccagacgagcgctccccaaccaaggacaacggcctcccaggcgctcatcgtccacccgcaggagggtgcccgcagagcttcaagaaggtggttgtcacgcctgtcgccctctgccctcatcgagaaatgtagccacagctcgacgcagggacggagaaggaagccggcaaggggatggggcaagcatgtctgtctctcaaaggctggccttcctggccgagtcacccgtttgacactcctccccggatgccggtggtggtggcatggcccccccgtatcctgcctgggctctggcctctgctctgacctccctcttgctgtgtctgccccgcctctgagaagcctggcggcttcttagtgtggctcagtgtcttccacaaagaagacttccccgtccatcagggagaaacctcgtggcggtccgcgtcatgcttgtttccctctccacacctctttctggatgattgggcagctgtggtgatcctggagctctgggcttccatacctgtgtgggacagggaagctctctcggtctccatggcccaagtgatggctgcacgctcggtccaggaagaggcggaggcaagcccaccgctcctgacattggccttctaggaaaggcggtgttgcatcccacctgcacttcctctctgattcttgagggccaaccgcttcctccgctcctggggaaagtgccttctagcaccgaatcttttggctgccacggatgtcagggagccaacgggactgggttttggctgggtgcaggggaggttgcgtcaggggtacctagccggcggcgggctgggggtggggtgtactttgtccaaacctctcggctcctctggcgggcctccctgaacgtggcgtggactcgcgcacaggccctgtctcgcaggttttcaggtgcgcttggcttttcctccgctttgtggggcaggtctccagtggccccccgggcgcacgcctggacatcactgtccgtctcgtcgtcgccccctacggcctcaaagacacacgctgcctgcatgtgctcttgggggacgacagtgccacatgtggacacactggctccagctcggactcgcctctgtctctctttgcccgtgtcgccggaagccgcctcgggttgccggagccctcgggccttggagatgaaggcaggcccctgctcctgccaggaaggagggaggcagtgggctcatgggtcggtgcctttgcagccgacagcacgccttgcggccctggggatcttcctgtgccccggcgagaccctttccgcctcactgcattggaaccccattcccgatcacccgctgggatccatcatcggaccccaagaggagtccgcgcagcccagccggcaccccgaagctcctccttcagtgggaaccgaagcagaagagcgatcaaggaggtcctcaccacaggactcatgggtccgaccatgggtctcccgcaggcccctctggcagtcctcttcccacccgccgcctcgggctgcgccttcgccgccgccgccgcaacctccagcaccgccgccccaggccccgcagccgccgcgtcgccgccattttttaaagggtccgcagcctgactctgcggagtaagggggggtggagcgggggagtcggcctcgccagcgcgcatgcgcgaggcccgagccgccgcttgggtcacagtgaaagccaccgttgcccggggatgggtccctgacacttggggaagtaggagccctgtgtgatcgtgcgtctgagtctgggctgagaccagtcctggccagggcagttaccaggacggtctccggaggccgggattcgcggagggtccagcagcaggaagaaaccccaggaggaagaaacctcagacagatcgccggcgaggcagcgcgggatcccagcctcaggcgtgcgcggacggtgtgcgggtgagtctccccaaaagtggagcccttgtgatgacgagcacaggtccgcctgcgtgcccgtgggctgctctctcaccggtggctctcagtcgcggagagcagaacccggcagcttcaggggctgcctgcgggagggtgttccctgctgtacgtgtgtgttcgtcatgggtgtgtgtgtgtgtgtgttggggggggtgcgtctgtgtgtgtgtctgtgtgtgtgcgcgcgcagtgcctgtctgtgtgccgacttctgtctctctctcacgtctctctctctctctctctctctctctctctctccctctccctctctcccttctcgctctttccgtggccctctctttctgtctctgtccgtctgtgtgtgcgtgcgcctcgggacacatgtgccctgtgcgccggagggtgggtttcttgcacgtcggcctttcttctggtcagcctctccccgcgtctctgtctgggtcgtgtggccggttggcagtcgtcgtcccggcggttccagtttgggggtctgtgaaggcctgggcaacgtgggcatcggcgtcggacccgcaggggttttcatcccctccccatccggagcagcctctttgctaggctggatccagacgagcgctccccaaccaaggacaacggcctcccaggcgctcatcgtccacccgcaggagggtgcccgcagagcttcaagaaggtggttgtcacgcctgtcgccctctgccctcatcgagaaatgtagccacagctcgacgcagggacggagaaggaagccggcaaggggatggggcaagcatgtctgtctctcaaaggctggccttcctggccgagtcacccgtttgacactcctccccggatgccggtggtggtggcatggcccccccgtatcctgcctgggctctggcctctgctctgacctccctcttgctgtgtctgccccgtctctgagaagcctggcggcttcttagtgtggctcagtgtcttccacaaagaagacttccccgtccatcagggagaaacctcgtggcggtccgcgtcatgattgtttccctctccacacctctttctggatgattgggcagctgtggtgatcctggagctctgggcttccatacctgtgtgggacagggaagctctctcggtctccatggcccaagtgatggctgcacgctcggtccaggaagaggcggaggcaagcccaccgctcctgacattggccttctaggaaaggcggtgttgcatcccacctgcacttcctctctgattcttgagggccaaccgcttcctccgctcctggggaaagtgccttctagcaccgaatcttttggctgccacggatgtcagggagccaacgggactgggttttggctgggtgcaggggaggttgcgtcaggggtacctagccggcggcgggctgggggtggggtgtactttgtccaaacctctcggctcctctggcgggcctccctgaacgtggcgtggactcgcgcacaggccctgtctcgcaggttttcaggtgcgcttggcttttcctccgctttgtggggcaggtctccagtggccccccgggcgcacgcctggacatcactgtccgtctcgtcgtcgccccctacggcctcaaagacacacgctgcctgcatgtgctcttgggggacgacagtgccacatgtggacacgctggctccagctcggactcgcctctgtctctctttgcccgtgtcgccggaagccgcctcgggttgccggagccctcgggccttggagatgaaggcaggcccctgctcctgccaggaaggagggaggcagtgggctcatgggtcggtgcctttgcagccgacagcacgccttgcggccctggggatcttcctgtgccccggcgagaccctttccgcctcactgcattggaaccccattcccgatcacccgctgggatccatcatcggaccccaagaggagtccgcgcagcccagccggcaccccgaagctcctccttcagtgggaaccgaagcagaagagcgatcaaggaggtcctcaccacaggactcctatgggtccgaccctgggtctcccgcaggcccctctggcagtcctcttcccacccgccgcctcgggctgcgccttcgccgccgccgccgcaacctccagcaccgccgccccaggccccgcagccgccgcgtcgccgccattttttaaagggtccgcagcctgactctgcggagtaagggggggtggagcgggggagtcggcctcgccagcgcgcatgcgcgaggcccgagccgccgcttgggtcacagtgaaagccaccgttgcccggggatgggtccctgacacttggggaagtaggagccctgtgtgatcgtgcgtctgagtctgggctgagaccagtcctggccagggcagttaccaggacggtctccggaggccgggattcgcggagggtccagcagcaggaagaaaccccaggaggaagaaacctcagacagatcgccggcgaggcagcgcgggatcccagcctcaggcgtgcgcggacggtgtgcgggtgagtctccccaaaagtggagcccttgtgatgacgagcacaggtccgcctgcgtgcccgtgggctgctctctcaccggtggctctcagtcgcggagagcagaacccggcagcttcaggggctgcctgcgggagggtgttccctgctgtacgtgtgtgttcgtcatgggtgtgtgtgtgtgtgtgttggggggggtgcgtctgtgtgtgtgtctgtgtgtgtgcgcgcgcagtgcctgtctgtgtgccgacttctgtctctctctcacgtctctctctctctctctctctctctctctctctctctgtctcccttctcgctctttccgtggccctctctttctgtctctgtccgtctgtgtgtgcgtgcgcctcgggacacatgtgccctgtgcgccggagggtgggtttcttgcacgtcggcctttcttctggtcagcctctccccgcgtctctgcctgggtcgtgtggccggttggcagtcgtcgtcccggcggttccagtttgggggtctgtgaaggcctgggcaacgtgggcatcggcgtcggacccgcaggggttttcatcccctccccatccggagcagcctctttgctaggctggatccagacgagcgctccccaaccaaggacaacggcctcccaggcgctcatcgtccacccgcaggagggtgcccgcagagcttcaagaaggtggttgtcacgcctgtcgccctctgccctcatcgagaaatgtagccacagctcgacgcagggacggagaaggaagccggcaaggggatggggcaagcatgtctgtctctcaaaggctggccttcctggccgagtcacccgtttgacactcctccccggatgccggtggtggtggcatggcccccccgtatcctgcctgggctctggcctctgctctgacctccctcttgctgtgtctgccccgcctctgagaagcctggcggcttcttagtgtggctcagtgtcttccacaaagaagacttccccgtccatcagggagaaacctcgtggcggtccgcgtcatgattgtttccctctccacacctctttctggatgattgggcagctgtggtgatcctggagctctgggcttccatacctgtgtgggacagggaagctctctcggtctccatggcccaagtgatggctgcacgctcggtccaggaagaggcggaggcaagcccaccgctcctgacattggccttctaggaaaggcggtgttgcatcccacctgcacttcctctctgattcttgagggccaaccgcttcctccgctcctggggaaagtgccttctagcaccgaatcttttggctgccacggatgtcagggagccaacgggactgggttttggctgggtgcaggggaggttgcgtcaggggtacctagccggcggcgggctgggggtggggtgtactttgtccaaacctctcggctcctctggcgggcctccctgaacgtggcgtggactcgcgcacaggccctgtctcgcaggttttcaggtgcgcttggcttttcctccgctttgtggggcaggtctccagtggccccccgggcgcacgcctggacatcactgtccgtctcgtcgtcgccccctacggcctcaaagacacacgctgcctgcatgtgctcttgggggacgacagtgccacatgtggacacactggctccagctcggactcgcctctgtctctctttgcccgtgtcgccggaagccgcctcgggttgccggagccctcgggccttggagatgaaggcaggcccctgctcctgccaggaaggagggaggcagtgggctcatgggtcggtgcctttgcagccgacagcacgccttgcggccctggggatcttcctgtgccccggcgagaccctttccgcctcactgcattggaaccccattcccgatcacccgctgggatccatcatcggaccccaagaggagtccgcgcagcccagccggcaccccgaagctcctccttcagtgggaaccgaagcagaagagcgatcaaggaggtcctcaccacaggactcatgggtccgaccctgggtctcccgcaggcccctctggcagtcctctccccacccgccgcctcgggctgcgccttcgccgccgccgccgcaacctccagcaccgccgccccaggccccgcagccgccgcgtcgccgccattttttaaagggtccgcagcctgactctgcggagtaagggggggtggagcgggggagtcggcctcgccagcgcgcatgcgcgaggcccgagccgccgcttgggtcacagtgaaagccaccgttgcccggggatgggtccctgacacttggggaagtaggagccctgtgtgatcgtacgtctgagtctgggctgagaccagtcctggccagggcagttaccaggacggtctccggaggccgggattcgcggagggtccagcagcaggaagaaaccccaggaggaagaaacctcagacagatcgccggcgaggcagcgcgggatcccagcctcaggcgtgcgcggacggtgtgcgggtgagtctccccaaaagtggagcccttgtgatgacgagcacaggtccgcctgcgtgcccgtgggctgctctctcaccggtggctctcagtcgcggagagcagaacccggcagcttcaggggctgcctgcgggagggtgttccctgctgtacgtgtgtgttcgtcatgggtgtgtgtgtgtgtgtgttgggggggtgcgtctgtgtgtgtgtctgtgtgtgtgcgcgcgcagtgcctgtctgtgtgccgacttctgtctctctctcacgtctctctctctctctctctctctctctctctctctctctctctgtctcccttctcgctctttccgtggccctctctttctgtctctgtccgtctgtgtgtgcgtgcgcctcgggacacatgtgccctgtgcgccggagggtgggtttcttgcacgtcggcctttcttctggtcagcctctccccgcgtctctgcctgggtcgtgtggccggttggcagtcgtcgtcccggcggttccagtttgggggtctgtgaaggcctgggcaacgtgggcatcggcgtcggacccgcaggggttttcatcccctccccatccggagcagcctctttgctaggctggatccagacgagcgctccccaaccaaggacaacggcctcccaggcgctcatcgtccacccgcaggagggtgcccgcagagcttcaagaaggtggttgtcacgcctgtcgccctctgccctcatcgagaaatgtagccacagctcgacgcagggacggagaaggaagccggcaaggggatggggcaagcatgtctgtctctcaaaggctggccttcctggccgagtcacccgtttgacactcctccccggatgccggtggtggtggcatggcccccccgtatcctgcctgggctctggcctctgctctgacctccctcttgctgtgtctgccccgtctctgagaagcctggcggcttcttagtgtggctcagtgtcttccacaaagaagacttccccgtccatcagggagaaacctcgtggcggtccgcgtcatgattgtttccctctccacacctctttctggatgattgggcagctgtggtgatcctggagctctgggcttccatacctgtgtgggacagggaagctctctcggtctccatggcccaagtgatggctgcacgctcggtccaggaagaggcggaggcaagcccaccgctcctgacattggccttctaggaaaggcggtgttgcatcccacctgcacttcctctctgattcttgagggccaaccgcttcctccgctcctggggaaagtgccttctagcaccgaatcttttggctgccacggatgtcagggagccaacgggactgggttttggctgggtgcaggggaggttgcgtcaggggtacctagccggcggcgggctgggggtggggtgtactttgtccaaacctctcggctcctctggcgggcctccctgaacgtggcgtggactcgcgcacaggccctgtctcgcaggttttcaggtgcgcttggcttttcctccgctttgtggggcaggtctccagtggccccccgggcgcacgcctggacatcactgtccgtctcgtcgtcgccccctacggcctcaaagacacacgctgcctgcatgtgctcttgggggacgacagtgccacatgtggacacactggctccagctcggactcgcctctgtctctctttgcccgtgtcgccggaagccgcctcgggttgccggagccctcgggccttggagatgaaggcaggcccctgctcctgccaggaaggagggaggcagtgggctcatgggtcggtgcctttgcagccgacagcacgccttgcggccctggggatcttcctgtgccccggcgagaccctttccgcctcactgcattggaaccccattcccgatcacccgctgggatccatcatcggaccccaagaggagtccgcgcagcccagccggcaccccgaagctcctccttcagtgggaaccgaagcagaagagcgatcaaggaggtcctcaccacaggactcctatgggtccgaccctgggtctcccgcaggcccctctggcagtcctcttcccacccgccgcctcgggctgcgccttcgccgccgccgccgcaacctccagcaccgccgccccaggccccgcagccgccgcgtcgccgccattttttaaagggtccgcagcctgactctgcggagtaagggggggtggagcgggggagtcggcctcgccagcgcgcatgcgcgaggcccgagccgccgcttgggtcacagtgaaagccaccgttgcccggggatgggtccctgacacttggggaagtaggagccctgtgtgatcgtgcgtctgagtctgggctgagaccagtcctggccagggcagttaccaggacggtctccggaggccgggattcgcggagggtccagcagcaggaagaaaccccaggaggaagaaacctcagacagatcgccggcgaggcagcgcgggatcccagcctcaggcgtgcgcggacggtgtgcgggtgagtctccccaaaagtggagcccttgtgatgacgagcacaggtccgcctgcgtgcccgtgggctgctctctcaccggtggctctcagtcgcggagagcagaacccggcagcttcaggggctgcctgcgggagggtgttccctgctgtacgtgtgtgttcgtcatgggtgtgtgtgtgtgtgtgttggggggggtgcgtctgtgtgtgtgtctgtgtgtgtgcgcgcgcagtgcctgtctgtgtgccgacttctgtctctctctcacgtctctctctctctctctctctctctctctctctctctctctgtctcccttctcgctctttccgtggccctctctttctgtctctgtccgtctgtgtgtgcgtgcgcctcgggacacatgtgccctgtgcgccggagggtgggtttcttgcacgtcggcctttcttctggtcagcctctccccgcgtctctgcctgggtcgtgtggccggttggcagtcgtcgtcccggcggttccagtttgggggtctgtgaaggcctgggcaacgtgggcatcggcgtcggacccgcaggggttttcatcccctccccatccggagcagcctctttgctaggctggatccagacgagcgctccccaaccaaggacaacggcctcccaggcgctcatcgtccacccgcaggagggtgcccgcagagcttcaagaaggtggttgtcacgcctgtcgccctctgccctcatcgagaaatgtagccacagctcgacgcagggacggagaaggaagccggcaaggggatggggcaagcatgtctgtctctcaaaggctggccttcctggccgagtcacccgtttgacactcctccccggatgccggtggtggtggcatggcccccccgtatcctgcctgggctctggcctctgctctgacctccctcttgctgtgtctgccccgcctctgagaagcctggcggcttcttagtgtggctcagtgtcttccacaaagaagacttccccgtccatcagggagaaacctcgtggcggtccgcgtcatgattgtttccctctccacacctctttctggatgattgggcagctgtggtgatcctggagctctgggcttccatacctgtgtgggacagggaagctctctcggtctccatggcccaagtgatggctgcacgctcggtccaggaagaggcggaggcaagcccaccgctcctgacattggccttctaggaaaggcggtgttgcatcccacatgcacttcctctctgattcttgagggccaaccgcttcctccgctcctggggaaagtgccttctagcaccgaatcttttggctgccacggatgtcagggagccaacgggactgggttttggctgggtgcaggggaggttgcgtcaggggtacctagccggcggcgggctgggggtggggtgtactttgtccaaacctcttggctcctctggcgggcctccctgaacgtggcgtggactcgcgcacaggccctgtctcgcaggttttcaggtgcgcttggcttttcctccgctttgtggggcaggtctccagtggccccccgggcgcacgcctggacatcactgtccgtctcgtcgtcgccccctacggcctcaaagacacacgctgcctgcatgtgctcttgggggacgacagtgccacatgtggacacactggctccagctcggactcgcctctgtctctctttgcccgtgtcgccggaagccgcctcgggttgccggagccctcgggccttggagatgaaggcaggcccctgctcctgccaggaaggagggaggcagtgggctcatgggtcggtgcctttgcagccgacagcacgccttgcggccctggggatcttcctgtgccccggcgagaccctttccgcctcactgcattggaaccccattcccgatcacccgctgggatccatcatcggaccccaagaggagtccgcgcagcccagccggcaccccgaagctcctccttcagtgggaaccgaagcagaagagcgatcaaggaggtcctcaccacaggactcatgggtccgaccctgggtctcccgcaggcccctctggcagtcctctccccacccgccgcctcgggctgcgccttcgccgccgccgccgcaacctccagcaccgccgccccaggccccgcagccgccgcgtcgccgccattttttaaagggtccgcagcctgactctgcggagtaagggggggtggagcgggggagtcggcctcgccagcgcgcatgcgcgaggcccgagccgccgcttgggtcacagtgaaagccaccgttgcccggggatgggtccctgacacttggggaagtaggagccctgtgtgatcgtacgtctgagtctgggctgagaccagtcctggccagggcagttaccaggacggtctccggaggccgggattcgcggagggtccagcagcaggaagaaaccccaggaggaagaaacctcagacagatcgccggcgaggcagcgcgggatcccagcctcaggcgtgcgcggacggtgtgcgggtgagtctccccaaaagtggagcccttgtgatgacgagcacaggtccgcctgcgtgcccgtgggctgctctctcaccggtggctctcagtcgcggagagcagaacccggcagcttcaggggctgcctgcgggagggtgttccctgctgtacgtgtgtgttcgtcatgggtgtgtgtgtgtgtgtgttgggggggtgcgtctgtgtgtgtgtctgtgtgtgtgcgcgcgcagtgcctgtctgtgtgccgacttctgtctctctctcacgtctctctctctctctctctctctctctctctctctgtctcccttctcgctctttccgtggccctctctttctgtctctgtccgtctgtgtgcgtgcgcctcgggacacatgtgccctgtgcgccggagggtgggtttcttgcacgtcggcctttcttctggtcagcctctccccgcgtctctgcctgggtcgtgtggccggttggcagtcgtcgtcccggcggttccagtttgggggtctgtgaaggcctgggcaacgtgggcatcggcgtcggacccgcaggggttttcatcccctccccatccggagcagcctctttgctaggctggatccagacgagcgctccccaaccaaggacaacggcctcccaggcgctcatcgtccacccgcaggagggtgcccgcagagcttcaagaaggtggttgtcacgcctgtcgccctctgccctcatcgagaaatgtagccacagctcgacgcagggacggagaaggaagccggcaaggggatggggcaagcatgtctgtctctcaaaggctggccttcctggccgagtcacccgtttgacactcctccccggatgccggtggtggtggcatggcccccccgtatcctgcctgggctctggcctctgctctgacctccctcttgctgtgtctgccccgcctctgagaagcctggcggcttcttagtgtggctcagtgtcttccacaaagaagacttccccgtccatcagggagaaacctcgtggcggtccgcgtcatgattgtttccctctccacacctctttctggatgattgggcagctgtggtgatcctggagctctgggcttccatacctgtgtgggacagggaagctctctgggtctccatggcccaagtgatggctgcacgctcggtccaggaagaggcggaggcaagcccaccgctcctgacattggccttctaggaaaggcggtgttgcatcccacctgcacttcctctctgattcttgagggccaaccgcttcctccgctcctggggaaagtgccttctagcaccgaatcttttggctgccacggatgtcagggagccaacgggactgggttttggctgggtgcaggggaggttgcgtcaggggtacctagccggcggcgggctgggggtggggtgtactttgtccaaacctctcggctcctctggcgggcctccctgaacgtggcgtggactcgcgcacaggccctgtctcgcaggttttcaggtgcgcttggcttttcctccgctttgtggggcaggtctccagtggccccccgggcgcacgcctggacatcactgtccgtctcgtcgtcgccccctacggcctcaaagacacacgctgcctgcatgtgctcttgggggacgacagtgccacatgtggacacactggctccagctcggactcgcctctgtctctctttgcccgtgtcgccggaagccgcctcgggttgccggagccctcgggccttggagatgaaggcaggcccctgctcctgccaggaaggagggaggcagtgggctcatgggtcggtgcctttgcagccgacagcacgccttgcggccctggggatcttcctgtgccccggcgagaccctttccgcctcactgcattggaaccccattcccgatcacccgctgggatccatcatcggaccccaagaggagtccgcgcagcccagccggcaccccgaagctcctccttcagtgggaaccgaagcagaagagcgatcaaggaggtcctcaccacaggactcctatgggtccgaccctgggtctcccgcaggcccctctggcagtcctcttcccacccgccgcctcgggctgcgccttcgccgccgccgccgcaacctccagcaccgccgccccaggccccgcagccgccgcgtcgccgccattttttaaagggtccgcagcctgactctgcggagtaagggggggtggagcgggggagtcggcctcgccagcgcgcatgcgcgaggcccgagccgccgcttgggtcacagtgaaagccaccgttgcccggggatgggtccctgacacttggggaagtaggagccctgtgtgatcgtgcgtctgagtctgggctgagaccagtcctggccagggcagttaccaggacggtctccggaggccgggattcgcggagggtccagcagcaggaagaaaccccaggaggaagaaacctcagacagatcgccggcgaggcagcgcgggatcccagcctcaggcgtgcgcggacggtgtgcgggtgagtctccccaaaagtggagcccttgtgatgacgagcacaggtccgcctgcgtgcccgtgggctgctctctcaccggtggctctcagtcgcggagagcagaacccggcagcttcaggggctgcctgcgggagggtgttccctgctgtacgtgtgtgttcgtcatgggtgtgtgtgtgtgtgtgttggggggggtgcgtctgtgtgtgtgtctgtgtgtgtgcgcgcgcagtgcctgtctgtgtgccgacttctgtctctctctcacgtctctctctctctctctctctctctctgtctcccttctcgctctttccgtggccctctctttctgtctctgtccgtctgtgtgtgcgtgcgcctcgggacacatgtgccctgtgcgccggagggtgggtttcttgcacgtcggcctttcttctggtcagcctctccccgcgtctctgcctgggtcgtgtggccggttggcagtcgtcgtcccggcggttccagtttgggggtctgtgaaggcctgggcaacgtgggcatcggcgtcggacccgcaggggttttcatcccctccccatccggagcagcctctttgctaggctggatccagacgagcgctccccaaccaaggacaacggcctcccaggcgctcatcgtccacccgcaggagggtgcccgcagagcttcaagaaggtggttgtcacgcctgtcgccctctgccctcatcgagaaatgtagccacagctcgacgcagggacggagaaggaagccggcaaggggatggggcaagcatgtctgtctctcaaaggctggccttcctggccgagtcacccgtttgacactcctccccggatgccggtggtggtggcatggcccccccgtatcctgcctgggctctggcctctgctctgacctccctcttgctgtgtctgccccgcctctgagaagcctggcggcttcttagtgtggctcagtgtcttccacaaagaagacttccccgtccatcagggagaaacctcgtggcggtccgcgtcatgattgtttccctctccacacctctttctggatgattgggcagctgtggtgatcctggagctctgggcttccatacctgtgtgggacagggaagctctctgggtctccatggcccaagtgatggctgcacgctcggtccaggaagaggcggaggcaagcccaccgctcctgacattggccttctaggaaaggcggtgttgcatcccacctgcacttcctctctgattcttgagggccaaccgcttcctccgctcctggggaaagtgccttctagcaccgaatcttttggctgccacggatgtcagggagccaacgggactgggttttggctgggtgcaggggaggttgcgtcaggggtacctagccggcggcgggctgggggtggggtgtactttgtccaaacctctcggctcctctggcgggcctccctgaacgtggcgtggactcgcgcacaggccctgtctcgcaggttttcaggtgcgcttggcttttcctccgctttgtggggcaggtctccagtggccccccgggcgcacgcctggacatcactgtccgtctcgtcgtcgccccctacggcctcaaagacacacgctgcctgcatgtgctcttgggggacgacagtgccacatgtggacacgctggctccagctcggactcgcctctgtctctctttgcccgtgtcgccggaagccgcctcgggttgccggagccctcgggccttggagatgaaggcaggcccctgctcctgccaggaaggagggaggcagtgggctcatgggtcggtgcctttgcagccgacagcacgccttgcggccctggggatcttcctgtgccccggcgagaccctttccgcctcactgcattggaaccccattcccgatcacccgctgggatccatcatcggaccccaagaggagtccgcgcagcccagccggcaccccgaagctcctccttcagtgggaaccgaagcagaagagcgatcaaggaggtcctcaccacaggactcctatgggtccgaccctgggtctcccgcaggcccctctggcagtcctcttcccacccgccgcctcgggctgcgccttcgccgccgccgccgcaacctccagcaccgccgccccaggccccgcagccgccgcgtcgccgccattttttaaagggtccgcagcctgactctgcggagtaacggggggtggagcgggggagtcggcctcgccagcgcgcatgcgcgaggcccgagccgccgcttgggtcacagtgaaagccaccgttgcccggggatgggtccctgacacttggggaagtaggagccctgtgtgatcgtgcgtctgagtctgggctgagaccagtcctggccagggcagttaccaggacggtctccggaggccgggattcgcggagggtccagcagcaggaagaaaccccaggaggaagaaacctcagacagatcgccggcgaggcagcgcgggatcccagcctcaggcgtgcgcggacggtgtgcgggtgagtctccccaaaagtggagcccttgtgatgacgagcacaggtccgcctgcgtgcccgtgggctgctctctcaccggtggctctcagtcgcggagagcagaacccggcagcttcaggggctgcctgcgggagggtgttccctgctgtacgtgtgtgttcgtcatgggtgtgtgtgtgtgtgtgttggggggggtgcgtctgtgtgtgtgtctgtgtgtgtgcgcgcgcagtgcctgtctgtgtgccgacttctgtctctctctcacgtctctctctctctctctctctctctctctctctctctctgtctcccttctcgctctttccgtggccctctctttctgtctctgtccgtctgtgtgtgcgtgcgcctcgggacacatgtgccctgtgcgccggagggtgggtttcttgcacgtcggcctttcttctggtcagcctctccccgcgtctctgcctgggtcgtgtggccggttggcagtcgtcgtcccggcggttccagtttgggggtctgtgaaggcctgggcaacgtgggcatcggcgtcggacccgcaggggttttcatcccctccccatccggagcagcctctttgctaggctggatccagacgagcgctccccaaccaaggacaacggcctcccaggcgctcatcgtccacccgcaggagggtgcccgcagagcttcaagaaggtggttgtcacgcctgtcgccctctgccctcatcgagaaatgtagccacagctcgacgcagggacggagaaggaagccggcaaggggatggggcaagcatgtctgtctctcaaaggctggccttcctggccgagtcacccgtttgacactcctccccggatgccggtggtggtggcatggcccccccgtatcctgcctgggctctggcctctgctctgacctccctcttgctgtgtctgccccgcctctgagaagcctggcggcttcttagtgtggctcagtgtcttccacaaagaagacttccccgtccatcagggagaaacctcgtggcggtccgcgtcatgattgtttccctctccacacctctttctggatgattgggcagctgtggtgatcctggagctctgggcttccatacctgtgtgggacagggaagctctctgggtctccatggcccaagtgatggctgcacgctcggtccaggaagaggcggaggcaagcccaccgctcctgacattggccttctaggaaaggcggtgttgcatcccacctgcacttcctctctgattcttgagggccaaccgcttcctccgctcctggggaaagtgccttctagcaccgaatcttttggctgccacggatgtcagggagccaacgggactgggttttggctgggtgcaggggaggttgcgtcaggggtacctagccggcggcgggctgggggtggggtgtactttgtccaaacctctcggctcctctggcgggcctccctgaacgtggcgtggactcgcgcacaggccctgtctcgcaggttttcaggtgcgcttggcttttcctccgctttgtggggcaggtctccagtggccccccgggcgcacgcctggacatcactgtccgtctcgtcgtcgccccctacggcctcaaagacacacgctgcctgcatgtgctcttgggggacgacagtgccacatgtggacacgctggctccagctcggactcgcctctgtctctctttgcccgtgtcgccggaagccgcctcgggttgccggagccctcgggccttggagatgaaggcaggcccctgctcctgccaggaaggagggaggcagtgggctcatgggtcggtgcctttgcagccgacagcacgccttgcggccctggggatcttcctgtgccccggcgagaccctttccgcctcactgcattggaaccccattcccgatcacccgctgggatccatcatcggaccccaagaggagtccgcgcagcccagccggcaccccgaagctcctccttcagtgggaaccgaagcagaagagcgatcaaggaggtcctcaccacaggactcctatgggtccgaccctgggtctcccgcaggcccctctggcagtcctcttcccacccgccgcctcgggctgcgccttcgccgccgccgccgcaacctccagcaccgccgccccaggccccgcagccgccgcgtcgccgccattttttaaagggtccgcagcctgactctgcggagtaagggggggtggagcgggggagtcggcctcgccagcgcgcatgcgcgaggcccgagccgccgcttgggtcacagtgaaagccaccgttgcccggggatgggtccctgacacttggggaagtaggagccctgtgtgatcgtgcgtctgagtctgggctgagaccagtcctggccagggcagttaccaggacggtctccggaggccgggattcgcggagggtccagcagcaggaagaaaccccaggaggaagaaacctcagacagatcgccggcgaggcagcgcgggatcccagcctcaggcgtgcgcggacggtgtgcgggtgagtctccccaaaagtggagcccttgtgatgacgagcacaggtccgcctgcgtgcccgtgggctgctctctcaccggtggctctcagtcgcggagagcagaacccggcagcttcaggggctgcctgcgggagggtgttccctgctgtacgtgtgtgttcgtcatgggtgtgtgtgtgtgtgtgttggggggggtgcgtctgtgtgtgtgtctgtgtgtgtgcgcgcgcagtgcctgtctgtgtgccgacttctgtctctctctcacgtctctctctctctctctctctctctctctctctctctctgtctcccttctcgctctttccgtggccctctctttctgtctctgtccgtctgtgtgtgcgtgcgcctcgggacacatgtgccctgtgcgccggagggtgggtttcttgcacgtcggcctttcttctggtcagcctctccccgcgtctctgcctgggtcgtgtggccggttggcagtcgtcgtcccggcggttccagtttgggggtctgtgaaggcctgggcaacgtgggcatcggcgtcggacccgcaggggttttcatcccctccccatccggagcagcctctttgctaggctggatccagacgagcgctccccaaccaaggacaacggcctcccaggcgctcatcgtccacccgcaggagggtgcccgcagagcttcaagaaggtggttgtcacgcctgtcgccctctgccctcatcgagaaatgtagccacagctcgacgcagggacggagaaggaagccggcaaggggatggggcaagcatgtctgtctctcaaaggctggccttcctggccgagtcacccgtttgacactcctccccggatgccggtggtggtggcatggcccccccgtatcctgcctgggctctggcctctgctctgacctccctcttgctgtgtctgccccgtctctgagaagcctggcggcttcttagtgtggctcagtgtcttccacaaagaagacttccccgtccatcagggagaaacctcgtggcggtccgcgtcatgattgtttccctctccacacctctttctggatgattgggcagctgtggtgatcctggagctctgggcttccatacctgtgtgggacagggaagctctctcggtctccatggcccaagtgatggctgcacgctcggtccaggaagaggcggaggcaagcccaccgctcctgacattggccttctaggaaaggcggtgttgcatcccacctgcacttcctctctgattcttgagggccaaccgcttcctccgctcctggggaaagtgccttctagcaccgaatcttttggctgccacggatgtcagggagccaacgggactgggttttggctgggtgcaggggaggttgcgtcaggggtacctagccggcggcgggctgggggtggggtgtactttgtccaaacctctcggctcctctggcgggcctccctgaacgtggcgtggactcgcgcacaggccctgtctcgcaggttttcaggtgcgcttggcttttcctccgctttgtggggcaggtctccagtggccccccgggcgcacgcctggacatcactgtccgtctcgtcgtcgccccctacggcctcaaagacacacgctgcctgcatgtgctcttgggggacgacagtgccacatgtggacacactggctccagctcggactcgcctctgtctctctttgcccgtgtcgccggaagccgcctcgggttgccggagccctcgggccttggagatgaaggcaggcccctgctcctgccaggaaggagggaggcagtgggctcatgggtcggtgcctttgcagccgacagcacgccttgcggccctggggatcttcctgtgccccggcgagaccctttccgcctcactgcattggaaccccattcccgatcacccgctgggatccatcatcggaccccaagaggagtccgcgcagcccagccggcaccccgaagctcctccttcagtgggaaccgaagcagaagagcgatcaaggaggtcctcaccacaggactcctatgggtccgaccctgggtctcccgcaggcccctctggcagtcctcttcccacccgccgcctcgggctgcgccttcgccgccgccgccgcaacctccagcaccgccgccccaggccccgcagccgccgcgtcgccgccattttttaaagggtccgcagcctgactctgcggagtaagggggggtggagcgggggagtcggcctcgccagcgcgcatgcgcgaggcccgagccgccgcttgggtcacagtgaaagccaccgttgcccggggatgggtccctgacacttggggaagtaggagccctgtgtgatcgtgcgtctgagtctgggctgagaccagtcctggccagggcagttaccaggacggtctccggaggccgggattcgcggagggtccagcagcaggaagaaaccccaggaggaagaaacctcagacagatcgccggcgaggcagcgcgggatcccagcctcaggcgtgcgcggacggtgtgcgggtgagtctccccaaaagtggagcccttgtgatgacgagcacaggtccgcctgcgtgcccgtgggctgctctctcaccggtggctctcagtcgcggagagcagaacccggcagcttcaggggctgcctgcgggagggtgttccctgctgtacgtgtgtgttcgtcatgggtgtgtgtgtgtgtgtgttgggggggtgcgtctgtgtgtgtgtctgtgtgtgtgcgcgcgcagtgcctgtctgtgtgccgacttctgtctctctctcacgtctctctctctctctctctctctctctctctctctctgtctcccttctcgctctttccgtggccctctctttctgtctctgtccgtctgtgtgtgcgtgcgcctcgggacacatgtgccctgtgcgccggagggtgggtttcttgcacgtcggcctttcttctggtcagcctctccccgcgtctctgcctgggtcgtgtggccggttggcagtcgtcgtcccggcggttccagtttgggggtctgtgaaggcctgggcaacgtgggcatcggcgtcggacccgcaggggttttcatcccctccccatccggagcagcctctttgctaggctggatccagacgagcgctccccaaccaaggacaacggcctcccaggcgctcatcgtccacccgcaggagggtgcccgcagagcttcaagaaggtggttgtcacgcctgtcgccctctgccctcatcgagaaatgtagccacagctcgacgcagggacggagaaggaagccggcaaggggatggggcaagcatgtctgtctctcaaaggctggccttcctggccgagtcacccgtttgacactcctccccggatgccggtggtggtggcatggcccccccgtatcctgcctgggctctggcctctgctctgacctccctcttgctgtgtctgccccgtctctgagaagcctggcggcttcttagtgtggctcagtgtcttccacaaagaagacttccctgtccatcagggagaaacctcgtggcggtccgcgtcatgattgtttccctctccacacctctttctggatgattgggcagctgtggtgatcctggagctctgggcttccatacctgtgtgggacagggaagctctctcggtctccatggcccaagtgatggctgcacgctcggtccaggaagaggcggaggcaagcccaccgctcctgacattggccttctaggaaaggcggtgttgcatcccacctgcacttcctctctgattcttgagggccaaccgcttcctccgctcctggggaaagtgccttctagcaccgaatcttttggctgccacggatgtcagggagccaacgggactgggttttggctgggtgcaggggaggttgcgtcaggggtacctagccggcggcgggctgggggtggggtgtactttgtccaaacctctcggctcctctggcgggcctccctgaacgtggcgtggactcgcgcacaggccctgtctcgcaggttttcaggtgcgcttggcttttcctccgctttgtggggcaggtctccagtggccccccgggcgcacgcctggacatcactgtccgtctcgtcgtcgccccctacggcctcaaagacacacgctgcctgcatgtgctcttgggggacgacagtgccacatgtggacacactggctccagctcggactcgcctctgtctctctttgcccgtgtcgccggaagccgcctcgggttgccggagccctcgggccttggagatgaaggcaggcccctgctcctgccaggaaggagggaggcagtgggctcatgggtcggtgcctttgcagccgacagcacgccttgcggccctggggatcttcctgtgccccggcgagaccctttccgcctcactgcattggaaccccattcccgatcacccgctgggatccatcatcggaccccaagaggagtccgcgcagcccagccggcaccccgaagctcctccttcagtgggaaccgaagcagaagagcgatcaaggaggtcctcaccacaggactcatgggtccgaccatgggtctcccgcaggcccctctggcagtcctctccccacccgccgcctcgggctgcgccttcgccgccgccgccgcaacctccagcaccgccgccccaggccccgcagccgccgcgtcgccgccattttttaaagggtccgcagcctgactctgcggagtaagggggggtggagcgggggagtcggcctcgccagcgcgcatgcgcgaggcccgagccgccgcttgggtcacagtgaaagccaccgttgcccggggatgggtccctgacacttggggaagtaggagccctgtgtgatcgtgcgtctgagtctgggctgagaccagtcctggccagggcagttaccaggacggtctccggaggccgggattcgcggagggtccagcagcaggaagaaaccccaggaggaagaaacctcagacagatcgccggcgaggcagcgcgggatcccagcctcaggcgtgcgcggacggtgtgcgggtgagtctccccaaaagtggagcccttgtgatgacgagcacaggtccgcctgcgtgcccgtgggctgctctctcaccggtggctctcagtcgcggagagcagaacccggcagcttcaggggctgcctgcgggagggtgttccctgctgtacgtgtgtgttcgtcatgggtgtgtgtgtgtgtgtgttggggggggtgcgtctgtgtgtgtgcgcgcgcagtgcctgtctgtgtgccgacttctgtctctctctcacgtctctctctctctctctctctctctctctctctgtctcccttctcgctctttccgtggccctctctttctgtctctgtccgtctgtgtgtgcgtgcgcctcgggacacatgtgccctgtgcgccggagggtgggtttcttgcacgtcggcctttcttctggtcagcctctccccgcgtctctgcctgggtcgtgtggccggttggcagtcgtcgtcccggcggttccagtttgggggtctgtgaaggcctgggcaacgtgggcatcggcgtcggacccgcaggggttttcatcccctccccatccggagcagcctctttgctaggctggatccagacgagcgctccccaaccaaggacaacggcctcccaggcgctcatcgtccacccgcaggagggtgcccgcagagcttcaagaaggtggttgtcacgcctgtcgccctctgccctcatcgagaaatgtagccacagctcgacgcagggacggagaaggaagccggcaaggggatggggcaagcatgtctgtctctcaaaggctggccttcctggccgagtcacccgtttgacactcctccccggatgccggtggtggtggcatggcccccccgtatcctgcctgggctctggcctctgctctgacctccctcttgctgtgtctgccccgtctctgagaagcctggcggcttcttagtgtggctcagtgtcttccacaaagaagacttccccgtccatcagggagaaacctcgtggcggtccgcgtcatgattgtttccctctccacacctctttctggatgattgggcagctgtggtgatcctggagctctgggcttccatacctgtgtgggacagggaagctctctcggtctccatggcccaagtgatggctgcacgctcggtccaggaagaggcggaggcaagcccaccgctcctgacattggccttctaggaaaggcggtgttgcatcccacctgcacttcctctctgattcttgagggccaaccgcttcctccgctcctggggaaagtgccttctagcaccgaatcttttggctgccacggatgtcagggagccaacgggactgggttttggctgggtgcaggggaggttgcgtcaggggtacctagccggcggcgggctgggggtggggtgtactttgtccaaacctctcggctcctctggcgggcctccctgaacgtggcgtggactcgcgcacaggccctgtctcgcaggttttcaggtgcgcttggcttttcctccgctttgtggggcaggtctccagtggccccccgggcgcacgcctggacatcactgtccgtctcgtcgtcgccccctacggcctcaaagacacacgctgcctgcatgtgctcttgggggacgacagtgccacatgtggacacactggctccagctcggactcgcctctgtctctctttgcccgtgtcgccggaagccgcctcgggttgccggagccctcgggccttggagatgaaggcaggcccctgctcctgccaggaaggagggaggcagtgggctcatgggtcggtgcctttgcagccgacagcacgccttgcggccctggggatcttcctgtgccccggcgagaccctttccgcctcactgcattggaaccccattcccgatcacccgctgggatccatcatcggaccccaagaggagtccgcgcagcccagccggcaccccgaagctcctccttcagtgggaaccgaagcagaagagcgatcaaggaggtcctcaccacaggactcatgggtccgaccatgggtctcccgcaggcccctctggcagtcctcttcccacccgccgcctcgggctgcgccttcgccgccgccgccgcaacctccagcaccgccgccccaggccccgcagccgccgcgtcgccgccattttttaaagggtccgcagcctgactctgcggagtaagggggggtggagcgggggagtcggcctcgccagcgcgcatgcgcgaggcccgagccgccgcttgggtcacagtgaaagccaccgttgcccggggatgggtccctgacacttggggaagtaggagccctgtgtgatcgtacgtctgagtctgggctgagaccagtcctggccagggcagttaccaggacggtctccggaggccgggattcgcggagggtccagcagcaggaagaaaccccaggaggaagaaacctcagacagatcgccggcgaggcagcgcgggatcccagcctcaggcgtgcgcggacggtgtgcgggtgagtctccccaaaagtggagcccttgtgatgacgagcacaggtccgcctgcgtgcccgtgggctgctctctcaccggtggctctcagtcgcggagagcagaacccggcagcttcaggggctgcctgcgggagggtgttccctgctgtacgtgtgtgttcgtcatgggtgtgtgtgtgtgtgtgttgggggggtgcgtctgtgtgtgtgtctgtgtgtgtgcgcgcgcagtgcctgtctgtgtgccgacttctgtctctctctcacgtctctctctctctctctctctctctctctctctctgtctcccttctcgctctttccgtggccctctctttctgtctctgtccgtctgtgtgtgcgtgcgcctcgggacacatgtgccctgtgcgccggagggtgggtttcttgcacgtcggcctttcttctggtcagcctctccccgcgtctctgcctgggtcgtgtggccggttggcagtcgtcgtcccggcggttccagtttgggggtctgtgaaggcctgggcaacgtgggcatcggcgtcggacccgcaggggttttcatcccctccccatccggagcagcctctttgctaggctggatccagacgagcgctccccaaccaaggacaacggcctcccaggcgctcatcgtccacccgcaggagggtgcccgcagagcttcaagaaggtggttgtcacgcctgtcgccctctgccctcatcgagaaatgtagccacagctcgacgcagggacggagaaggaagccggcaaggggatggggcaagcatgtctgtctctcaaaggctggccttcctggccgagtcacccgtttgacactcctccccggatgccggtggtggtggcatggcccccccgtatcctgcctgggctctggcctctgctctgacctccctcttgctgtgtctgccccgcctctgagaagcctggcggcttcttagtgtggctcagtgtcttccacaaagaagacttccccgtccatcagggagaaacctcgtggcggtccgcgtcatgattgtttccctctccacacctctttctggatgattgggcagctgtggtgatcctggagctctgggcttccatacctgtgtgggacagggaagctctctcggtctccatggcccaagtgatggctgcacgctcggtccaggaagaggcggaggcaagcccaccgctcctgacattggccttctaggaaaggcggtgttgcatcccacctgcacttcctctctgattcttgagggccaaccgcttcctccgctcctggggaaagtgccttctagcaccgaatcttttggctgccacggatgtcagggagccaacgggactgggttttggccgggtgcaggggaggttgcgtcaggggtacctagccggcggcgggctgggggtggggtgtactttgtccaaacctctcggctcctctggcgggcctccctgaacgtggcgtggactcgcgcacaggccctgtctcgcaggttttcaggtgcgcttggcttttcctccgctttgtggggcaggtctccagtggccccccgggcgcacgcctggacatcactgtccgtctcgtcgtcgccccctacggcctcaaagacacacgctgcctgcatgtgctcttgggggacgacagtgccacatgtggacacgctggctccagctcggactcgcctctgtctctctttgcccgtgtcgccggaagccgcgtcgggatgccggagccctcgggccttggagatgaaggcaggcccctgctcctgccaggaaggagggaggcagtgggctcatgggtcggtgcctttgcagccgacagcacgccttgcggccctggggatcttcctgtgccccggcgagaccctttccgcctcactgcattggaaccccattcccgatcacccgctgggatccatcgtcggaccccaagaggagtccgcgcagcccagccggcaccccgaagctcctccttcagcgggaacggaagcagaagagcgatcaaggaggtcctcaccacaggactcctatgggtccgaccctgggtctcccgcaggcccctctggcagtcctcttcccacccgtcgcctcgggctgcgccgccgccgccgccgccgcaacctccagcaccgccgccccaggccccgcagccgccgcgtcgccgccattttttaaagggtccgcagcctgactctgcggagtaagggggggtggagcggggggagtcggcctcgccagcgcgcaggcgcgaggcccgagccgccgcttgggtcacagtgaaagccaccgttgcccggggatgggtccctgacacttggggaagtaggagccctgtgtgatcgtgcgtctgagtctgggctgagaccagtcctggccagggcagttaccaggacggtctccggaggccgggattcgcggagggtccagcagcaggaagaaaccccaggaggaagaaacctcagacagatcgccggcgaggcagcgcgggatcccagcctctggcgtgcgcggacggtgtgcgggtgagtctccccaaaagtggagcccttgtgatgacgagcacaggtccgcctgtgtgcccgtgggctgctctctcaccggtggctcgtagtcgcgtaaagcagaagtagcagtttcagcggctgacactaagaacaatgcatactggcaaagtgaggtgtctcacatctttaatcccagcagtttgggaggctgaggcggatggatcacttgaggtcaggggatcacaccagcctaaccaacatgatgaaactccgcgtctactaaaaaaaagtaccagacagttagcgcggtgtggtggcatatgcctgtaaatcccagctatttgggaggctgaggcaggagaatcggttgaaccagtgtggccgaggttgcagtgagtgtagattgcaccactgcactctagcctgggtaacaagcacaaaactctgtctcaaaaaaaaaaaaaaaattatcagtgcagagttaggccagattcattttcagagtaggagggaatttcaaattatgggtgaaatgtcccaactgccggaaggtgaaagtgttctgtgatgtaaaatttaggtcacactctataaagcttctccttattctatgtgtgaacagctagtctgtatcttcacctatgcatatttaaaaatcaaccttacgaaggctcttggccaccataatccttcctaccctgtagcaagagcccagcctcagactatgtttccttctgcctccgagtgcaatgccttcccccgagtctccaaggtaccaaaccggtcaggggcagctgagacagctctacttgtacgagtcctccccaagcccttgaaatcacaggcatctctgctgtccctgccctttatccacatcactgaacaattaagcacacacatctgtgtagttttatttaaactgttccatgtgtgtttgtttacaattaacaacatgaatgactgcagtatggatgcagcagaaaggaatgctgagggaggactccagttggaatgagccacttttccaggactaggaatgaactttccccagtaccaacaaggcagcctccagggcaagaaatggtaacagaatccatcctgttgacagtcaagatggaattacagagaattctcacctcttttttgactctcaggtggaaacccccttcccatggggtgaagcgcagtctgctccagagacccactgttagggtcggggatgtcacagaaattaacagggcagccaattcccatccagaggggcccaggatgaccccgaaccctctagctcagccccaagctcgggccagggagtgaagcctttgtccccaagcaacagagtgagggtctgtctctaacccggtgggctccagtgaaaggaaaatggcctggaggtgcccacaggagggcgccctagttctgagacaggtctacggctcccagactgcgtccccatgagtaacagagggacacgcagaggggcatactgagtgcctataggggactcacagactgcagatgcacgctgcggatccagaagccggtcaggtaatgaggtgcagaggtgtggggaagacctgggtgcttccctgggtgccaaccagcctaacccgccggggccaccaaacagaagtgcttctgacattaacgcgacacacagaaggtgtgtagggtgggtagtggaagtgaccgcagaggcctctggggattgtagttttggagctagagaggcgggcaagcagttggcttcgcccacacggtgtgcctctcacatctgcacagcgcacacaaccaagcttaggagccgactgttaagatgccccagtgacacggacaagtttctcctctgcaacccaatgagagctgctgaccacgagagcatcgcgggaccgccaaaggattctggaaaatgtggtcccgggtggccagtgtgcgctgaccttcacctgaaggtgagctgagctcaccatgcaagtctccaccctggggtgcccttccccaagcagatgccaggttggggcagaagcagttcagggagaagcgatgcgctcctgggactgccggtttggggggcaacatcggccctgtgtcccctagagtaggagggtgtaccaggatggggaaccccaaggccgttttcagggagaacaagattggcttgaggcaaactcccggaatggagatggggagagtctggtcgcatttccccaggagtttaggggatgaaggctggacttgggtgaacagcaaaagatcccctggtgatagtggtggtgaggatcagaggcttgagccagaaattcccgaggtgtttgtttgttttgttttttttgagacagagtcttgatctgtctcccaggatgtagtgcaatggcatgctcttggctcattgcaacctccgcctcccaggttcaagcgattctcctgcctcagcctcccaagtagctgagattataggcacctgccactgtgcccacctaaattttttttgtttttttgtatttttagtagagacgatgtttcaccacattgcccagcctggtctcgaactcctgacctcaagtgatccacctgcctcggcctcccaaagtgctgggattacaggcatgagcccccacacccagctcatttttatcttttaacttaaaggtttttatttttctctatttttactcttacaggtacggcttgaaggaaacttctggagggtggggtggtgttgaagagaaggcacaattgtcaccattttgttcaacatgggcgttttctttgtgcattgatttgcatttttaaaggtattccattaaaaatatgtttatctattttaatgttttttttggtgcccctttaaattctctatccacagtcctgagccttaatacgaagtgagggcctggcctctgggcatcaagcagccagaaagtcccttaggagctttctctgaattgttgaattgtgactgatcttttcctttcctgacttccttaatatccacaatttcctcgtaaccatccccccaaagccacacccacaaggcacctccaagacctatcatgaagcagatattcaaagattatttgtaaatcttcacaccccaccccttccagaatgtcttccaacatcccttcgcctggagaaataaaacacaaggtttgcatgttgagtatcagcctctcccattgggtgggtgtttaggaaaaagaatcagccaagagccctattccagcccaggtaaatgactttgccaaagatttaatatccacaaatgtacaatgctcactgggaaccaaagtcaggcatggggctgggctttaaggagcacaaacaaaaaggagggactagaaaacttcagaaaggtattggtgggggatgttgcggggggacaggggacagcgaggatgtgggatcccgagatcatccaaatccctatgtgtagacatatgtgtataaaggcctttaagagactcaggctgatggggtatctgtaataaatcaaacataatataacagcacgtcaagtgataaggggactctggaaaaacaagcagcaaaaggagcagtatcaaactccacagaaattcacaaacatcaagacaccaagaaagctgcattcatttaaatcaaggtgacaggctgggctctgtagctccagcctgtaatcctagcactttgggaggccaaggtgggcagatcatttgaggttcaagaccagcctggccattatggtgaaagctcctctctactaaaaatacaaaaattagctgggcatgttggtgggtgcctgtaatcccagctaaagaggctgaggcaggagaatcactctgaacctgggaggcagaggttgtagtgagcagagatcacgccattgcactccggcctcggggacagaaccaaactccatctcaagtaaatcaataaatcaaaggtgacagttactgagtgatgcgggccaggtacaatgatataccttcatctggattaccctcgtgaatctgaatcacttgtgtgatatctgtgctttaacgagtcctatttcccatactcttagctggcttgagatgtgaaaatccacctaaattataaacagagtgaaaaaaaaaaaaaaaaaactagtgatgtccttccagggaacatgtctagttaaaattaacatagataaaaatcggcaaaaagatattttaaaaaatcttttgaaattaaaagccatataaaccactgtgtcaatgatgaattaaaagaagaaactgacctgcaaaccaggaaatacatggaaagaagcaatagtgaaaatgcttcagatctaaacctgtggaatgaggctacctcagtgtccaaaaatatcatcacttaaatatagtgccaaggggtggggtgtggtgactcacccctgtaatcccagtattttgggaggccaaggtgggcggatcacttgaggtcaagagttcgagaccaacctggctgacatggtgaaatgccgtctctactaaaaatacaaaaattagctgggtgtggtggcaggcacccataatcccagctactcaggaggctgaggaaagagaactgcttgagcccgggaaccggaggttgcagtgagctgagatggcaccactgtactacagcctgggtgacagagcgagactctgtctcaaaaacaaaaaatttccaatgaataaactacctagcaagacttatagaatgagactaaaaccatggctggaggaaaacttttagcctgaaagtagcctatgacttagaaattaaggcaaaaaactaaggagtaagaagttacccttcaggttagaaaaccaacagcataacaggaaatgagacagggaagaaataatcagatggggctgagatgggggcttatggggatgaaggaggcaggaagagcatgtgaagtttgtgcataaagtcactccctaaggacagtccctgggaggaaggtgggtgcacaatgatcgagctagatgtagaaggtctagaaggcaatcctggagggtacattcaggggttgacagcagataagaaaacaggagggaaagtcaagcgtggagcctttcctgtccccagcatggaagacagcaggagctggtgagtgaaagtgataaacagccttctcatcacaaaaaaagtcaagtacttgaggtaacggataggttaatttgattctcattccacactgtattgaaaaatcacaacatcattttataccccataaatatatacaatttagaagatacataaaaatcagcaaaaaaaaataaactattctttgaaatatttttcaaacatgcaatttatggggtacaacctaattcgtctatatatatatatatatatatgttttttaaacagggagtcaataaacacagcaaacagccccttgggagggagataaggaaaatggccataatgtgcccttagaaagacacagcatttaaatccatgcatgtgagaactccagggttcaaggtaagaccaggtcagtgaagaacagccggcttatcacctatagccacaggatggcaccaacacccactgctccagcctgagctggccagagagagaaaacattcaagaaaagctgggacttcccagaaggcctgagacctgcaggtcccacactgaagtccagtgagggaggaaggtatgatatgaggtgaaaaaaataccatagaggtgtagctgaaatgaaacatttaatagttattaaatagtcattgtacttcaggtaaaagtaggtaaaatgacagaaaacgagacgaatgagccagacaccacagatatgtaatgatggacaatgacctgatgtggagtgttcacccacacatgcagactttatatgttcacataaacatttatctgcatgcatcaccccatagagatgtttacacaaactgcactgacactgtgaagtcaacgaggagataaagtaaaaatcaaatagttatggagagggttgatctgtttagtgggaaacccttcagaacacgcacacagcatctcccctcccttctgaataccatccatagcctgcagtagatggcaaatcacagcctgggccacccttcccagaatgtcccaaacatggacatgcagaccacagaactcaccagatactcaagatgggtggtgccgggctctgaaagacatgcttcaagtaagagggactagaaaactctgccagggagcaagagggatcggggattccaggaggatccaggggcctgtgcaaagagcaagcagtgagcagacgtgtgtgtcagtgattcggtggcatgaactcaacaccatctaatacagcagctcacatttctgtgtgcatcagactcacctggggacttgttaaatacagattgttgggtctcactcctagagtttcttcttcagtattctagggagcagcctgtgaatctgtatttccagcatgattttcaggtgctattgatactgttggtccaaggaccacactatgatctaatttagcaccaggttaggggaggaactaaggagcaaagaagcaacagaagaagggacctgaagcctgtaggtgcttctctgtaaactcctcaaacataaaagccttcaagacattcaaagagcatttacagcatcatgtctacaaatacaaggcaccacgcagggagtgctccatcaagtagaagagcccactgagtgtccctctcttagtccgtttgtgttgctataacagaataccacagactgggtgatttataagcaagagttcacttggtttacggttctgaacactgggaaagtgaggggcctgcatctggtgaaggtctcactgtgccgtcctatggtggaaggtggaagggcaagagagtgaccacatgtgagaggggggagggggaaagagaaagggaaggaagccaacctcatccttttatcaggaaccccctcccaagataactaacccactctagcttcatccattcatgagggcagagccttcatgacctaatcacctcttaaaggttccactggtcaacactgttgcattaggggttgagtttccaacacatgaactttggggaacacattcaaaccacagcagtcctcatgtaaaccttccagaaaacctgtgtgcctggcactctggaatccctcttttccaccccttcccactgcaactctaacatcgtgtcccctcatcattttccattcgagcataggaaagaacacaatcactacacccatttttgatgaacctttcctacattaaaataattctatcacttagaaatttgcaaaaataaattttcatttttgatatgagcgaatatgaattttttttttttttttttttttttgagaaggagtcttgctctgtggcccaggctggaatgaagtggcaagatctcagctcactgcaatctctgcccccggggtcatgcgattctcctgcctcagccttccaagtagctgggattacaggcgtgcaacaccacacccggctaattttgtatttttaatagagatggggttttcccttgttggccaggatggtctcgaacccctgacctcaggtgatgcgcccgccttggactctcaaagtgctgggattacaggcatgagccactatgcctggccctgaatatgaaattctgtattagtttaatgaaatatctaaaatatatagaaaataattaccaaaaatgttcaatgatgcaaagcaacacatacagtgagatattacatcctaaaatatatagacataaatatgttatttaaaaaatcaagcagaaacataaggggctctatacacaccttttaaaataagctttctggccgggtgcagtggctgatgcctgtaatctcacactttgggaggccgaggcgggcgtatcacctgaggtcaggggttcgagaccagcctggccaacatggtgaaaccccatctctactaaaaatacaaaaattagctgggcatggtggtgggcacctgtaatcccagctactggagaggctgaggtagagagaactgcttgaacccaggaggcagaggttgcaggggtccaagatgtgccactgtactccagc[140 bp omitted]tggtgaaaccctgtctccatgaaaaatacaaaaaattagccaggtgtggtggcgggcgcctgtagtcacagctactcaggaggctgagggaggagaatggcgtgaacctgggaggtggagcttgcagtgagcagagattgcgccactgcactccagcctgggcaacagagcgagactccatctcaaaaaaataaaattaattataataataaaataaaataagctttctaggttgggcacagtggctcacccctgtaatcccagcactttgggaagctgaggcaggcagatcacttgaggtcaggagttcaagaccagcctagccaaaatggcaaaaaactgtctctactaaaaagacaaaaattagccaggcatggtggtgcacatctgtaatcccgggtactcgggaggctgaggcaggagaatcacttgaatctggaaggcagaggttgtagtgagctgagattgcaccactgcactccagactggttgccataggaagactgtgtctcaaaaaaaaaaaaaaagatttctagtttaacgctagaattaatttgaaattctgtcaagaaagaggtactcaaaaaacatgaaaactatgtaagtcactaatgtatcaaagaaaacaatcattcttgtattgcaaataaatacccaaccaagacaaaaaggcacgtcacgtgttatgggaaaagactgaaatgagggtgagaggaaaactgtgacccttgaatgtaagacagaaaaaaatcagcgcaggatgttaaggaattggaaataattctccatattaaagaattacaagagacagaaagagaggagagagggacacgatagtcacagactgcaggggtgtggggtagatgggaataaaggaggcagagagagcagtggggatgtacataaaatcaccctccagagctgtgctgtccaataaggcagccacttgccacatgtggctgctgagcacttgaaagatggctagtccaacctgagaaatgctgtaagtggaaaacacattttaaaaaaattctgaatactcagtataaaagaaagaatgggccagtgtggtggctcacatctgtaatcccagcactttggaaggccaaggcgggaggactgcttgagccagaagtttgagactggactgggcaacatagcaagacctcatctcttcagaaaaaaaaaaaattaggccgagtgcagtggctcatgcctgtaatcccaacactttgggaagccaaggtgggtggatcacttcagctctggagttcaagaccagcctggacaacatgccgaaaccctgtcttaacaaaaaaatacaaaaattattcaggcgtggtggcacatgtttttggtcccagctacttgggaggctgaggtgggaggatcatttcagccccggagatcgaggctgcagtgagccgagattgtgccactgcactccagcccggctgacagagtgagaccctgtctttaaaaaaaaaaaaaaactagcgtggcatggtggtgtgtgcctgtagtccgaatactaggaagactgaggcaggaggatctcaagcccaggagtctgaaactgcaatgagctatgctggtgccactgcattccagcctggaccacaaagcaagaccctgtctcaaagaaaagaaagactgtaagctatctcattaataatttttattttgataagatgttgaagtgatattttggataatgctaacattttaggtgaaataaaactaatttcacctgtttctttgtaaccttttttttttttttgagatggagtctccctctgtcgcccaggctggagtgcagtggcgctatctcggctcactgcaagctctgcctaccgggttcacgccattctcctgcctcagcctctcgagtagctgggactacaggcgcctgccaccacgcccagctaattttttgtatttttagtagagagggggtttcaccatgttggccaggatggtctcgatctcctgacctcgtgatccacccacctcagccttccaaagtgctgggattacaggtgtgagccactgcagctggcctctttttcacttttctaaagtgactactagaaaatctaaaatgacgtatgtgtctggcattgtatttctattggaaactactgctgtagagagaaatggtctctagggaggcagaaacatgagaaccacaagaaaggtggatggagggcagtgacagacacatctggtgggtaccttcaggtgcggacagcgggaacccaggagatttgggtgtggacaggcccccatctatgcacagcaggagagtagcatgactgacactaggggtgctgagctgacatacagaactattcagctttataaacatgtgaaaaacaccgctaagtcactgacattccacagaacaaatcataatagaaatgaaaaaacagccaggtgcggtggctcatgcctgtaatcccagcactttgagaggccaaggcggatggatcatgaggtcaggagatcgagaccatcctacctaacacagtgaaaccccgtctctactaaaaatacaaaaacaaaattagccaggcgtggtggcgggagcctgtacttccagctactccaggggctgaggtgggaaaatggcgtgaatctgggaggcagattcttgcagggagccgagatcgccacactacactccagcctggacaacagagcaagactccgtctaaaaaaaaaaaaaaaaaaaaaaaagagagagagaattaatcttgatggaaaatataaaacacttcttcaagaacattaaagaaaattctaaccaccaaaacatttggaattagggtaactgaaatggcagtttaatcctcctgaaggaattttaatttctcactaacagtactttaaagctaggggtagaaaattttttttatagcgtttcacaagcattaaagttaaaaatccaaaatcatgtttttctctgacaggaactcctcctcaaaacagaagaagcctataggattttaacctggaaactactcagggaatctggaatattccttccagggatatctgcagctgaaacctggcagtaatttaaacaaaaccagacaactcttggggtatggttggagcctgaggtctacagatgggtcattttatatgctgaggtctgaacaagatgattttaaccccttaaaatgatggaaacaaaataaaacagaataaattagaagacaacacaggtgagtagtttaaagggcctacttgctgtgttttctctggtcttcaggtctcctcactgtggcgggatccaggcgcagctctagaccaagaaatgggaggattttagagtgactgatgatttctctatcatctgcagttagtaaacattctccacagtttatgcaaaaagtaacaaaaccactgcagatgacaaacactaggtaacacacatactatctcccaaatacctacccacaagctcaacaattttaaactgttaggatcactggctctaatcaccatgacatgaggtcaccaccaaaccatcaagcgctaaacagacagaatgtttccactcctgatccactgtgtggagaagcacagagcttacccactggggccctgcatcagaagagatgcacatgcaccggggtgtgcatttgaacggagcgatcaaaccaccatccccacagctcctctgttcatgggcactgcagtctgtggcctcatgtcctttgggggacacagtgggaaggtaacccacatttcagtgacaccatcaagaaaaacacactgtggcaatttgccctgatttctcatgggccttttctcttttccctttgggttgtatagacttccctactgtccacctgaccactctcatgctgcccaaaaccatagcttaagtcatcagctaggcgtttcttggtgtaactatcgaaaggtgagccttacctgttcaatctctagcgagatttgttcaaaatctggacctagaagaataaataaacaagatttgcctgagtaggtttggctttttccttcttggggaaagcccttaagaaatatcagccccttggccaggcacccacctgtaatcccagcactttgggaggccaaggcgggtgcatcacctgacgtcacaagttcaagaccggcctggccaacatggtgaaaccccgtgtctactaaaaatataaaaaaattagccgggtgtggtggtgggcacctgtaatcccagctactctggaggctgaggcaagagaattgcttgaacccaggagacggaggttgcagtgagccaacacggtgccacagaactccagcctgggaaacagagtgagactctgtttcaaaaaaaaaaaaaaggaaatatcagaccatttgcccaacaactccttgtgcccttcctttaggaacacagtgaaaatccccccggctccacacactatagcgcaggacagacccacagagaacaagacccaagagaacccaccataatacaaactcagggcagggtttccaccatcaaatgttcaagcctgcaatgggttggggagagtggtggttcctgagctccagattttcgtggaggtgggaggtgggcactaggctttgaggagatgttacatctgtgcaaactcacacacaatgaagattacaccaggtcgggtgagatggttcagaaaagacagaaagcagaggaagaggctgaaaatatgggtttctctgtaaactgtgaggacagaaaataccagcaacaccccaggaagtgtttacagccgcatttcttcaattaacagggcaaagttagagcagcaacaaccagacaagggccaggcacttcccctggggcaactgatgtaaacctggaaatcagccaccctcagtgtcaccatttcatgatgaatcaaatatacagagaagttcattgatgggtttggcatcacaaagctaaaaaataaagccagagtcccaggcatatactgaatgctcattgactgaaaatcaacctcactggataagcgcaaaagaactcattttccacatcccttacggtatcctctctggtggctatttgctctgtaaattacctatgacagaagaaaaagaaggaaatgaaaactcaggaaagtaaacactcttctaaactcatgaatagtaaaatatggaaatatccctgagaatctaggagaatatccaaagaaaatgcattataggagggtaaaaaggccatttggcaaagcctacaaaatgagtccaaaatatggttcacaaggaaacttaccttccaatgcatccaaaacagaagaacagcaaaagaagctcctgattcctactgaggtgagaatatcggcacaaacagaaggaaatcaggccaaaaaaaagttacaggccaatttctaaactgctgttagatctaaaacaaatgagaaagtcctgccctaaccaataaaccagagcaaacactatgcatttcaaacactgggggacgtgggcgggggtgagcctgttctgtgcaggacccttctaacatatgggagagtctttgacccctcctcagaataatgccataaactataaaaaaacacaattcatagaatttcaaaggagaccaattacttagaaatgcagctatcaggatgctttaattttttctgacatattaatattgctgtgatagttttaaaaaatagctgaacatttcttgccactcctccctttgggaggcagaatcgatgtcctgtctcccctatcctgggtggatttgctgtgctacctcataaaagacccctcagcatctgccctggagccctgtgcctcctaagaattctgactaccctgaggctgccaggctgtaaggaagtcaaggccatatggaaacactacatataggcactcagtctcagctcaccccctcttccaacatcccaagccaggtatcagatgtgagggaacaagcctccaaatggtcccagaccccagctgttgagtctcctgtgctgaggccagacatcatagacagagacaagtgggctacccttgtgccctgtctgaaatcctgacctgaccatgagaatccacaaacataataaaatgattgtttgagccactaaattttggtgtaattcctgacatactaatagtgtctgtaacagccaccttaacacattaagtaacaatagcaagtagcaagtcatcactgggaagtgttatttggaattgtcttgggaagcagtgacaaccatgaaggctatttggagatgctgtcagatgacataaaaactgctgtggtctcactgttaacaatgtcccatacccacggggtctacagcctatattcaagatggaaggaaacactacattttggttagaggaatgtgatttatatacatataaatcggctgggtgtggtggatcacacctgtaatcccagcactttcggaggccgaggcgggcagatcacccgaggcggggagttccagaccagcttgaccaacatgaagaaaccccatctttactaaaaatacaaaattagctgggtgtggtggcgcatgcctataatcccaactactctcgaggctgaggcaggagaatcgcttgaacctgggaggcggaagttgcagtgagccaagatcgcaccattgcactccagcctgggcaacaagagtgaaactccttctcaaaaaaaaaaaataaataaataaataaataatcaaaaccagtattacagttgataaaggaaatcccaaaacctccttaactggtttctttcataaaagttactctacatacgtgccctaaaaataagacgttggggaaaatactaccacggtcgtacctgagcgagttagagaaaacgccacactttgagacacatgaagaatccgtttatttagctggtggccaagagacggctaacgctcgaaattctctcggcctgaagaaggggctagatttgcttttatactttggtttagaaaggagagggggggtctagttaaaacaattttacagaaataaagtaggcaaaaaagttaaaaggataaatggttacaggaacgttaatagttccaggtgcaggggctttaagattattacaaggtgatagacgcggggcttttgggtgtaatcaattggacgaattcctgggaactgcggatatagcttgccacagtatcttatcagttaattgcattcttggatgtgctgggagtcagcttgcacaagttaagtccttgaggaagcggctgccagtgaaagagccaagatggagtccatctggcgctcttagctaagggagagtcaattcaggtggaaacaaggctgagtgattaaaggaaagggagagtctaaaaacagggttagtaaaaaccaggttggacactacattccccacttgtgtttttggggaatcaaatcattgattcctcagttataacaagggggttatattgagtcttaagatacataagtttgacagaagctatgcattgttttacaaaattaagaaaaagaattaatctaatggcttcacccaacttaggtgcagttttaaggggcctgacccagccctggggacccatgtttctagttgggctccgttggcctttttgatgcgggagtgatgaatccacgcaggaatgccatccaccttcagagccgttggcatcgtgatgacggtgtgaggtctcttccaagcaggagggagtccttctctctggaactttttaacaaacaacaggtcacctggcgggaatgaatggcagggccctgtctgttcaggaattggattgggatgggttcctcgaacaagtggcaggatgatatcttgtacctgttggggagactgtaggtactgtaataaattagtttgtgatatttttgccaattgggcatctcttagcttaggcaagataggcagcgccctcccatacatgatttcaaaaggtaagaacccagcccagtaaggggtgcaccttactctaagtagggctaaaggaaggagacttacacaatttacaccggtttctaagattaattttgtaagagtgttttttagggtgcagttcatgcgttctacttgcccagagctctggggtcgataggcacaatggagcttccattgaatgtttaacgccttactgactgactaaactatagacaaggcgaaggccggtccattatcagaccctatggcaacaggcagcccatgtcgagggatgatttcattgagtaaaaacttaactaccatattgacagtttcgtttttggtagcaaatgcttcagtccatccagagaaggtgtctaccagtactagaaggtatttgtacccagcccggtgtggttttacttctgtaaagtcaatttcccacttttctcctggtgagttttcttggagacggtggcctgggctgggtttaggaccttttttggcatttacctgggcgcaggttgtgcaccggagagctgcttgatctgttaggctttgaagatgggggatcttaaaacggctccggaggagctgaggtagctttgctcctcctaaatgggtggtagactgtaggtgactgattaaagttttcccaagagttcggggtatgaagattctagagtcaggaagaatccaccaaccttcctgatttttattggctctgagttctgaggccagttttcttcttctgttgagtatgcgggattgtcaggcagatctggctgtggaaaggagactgtgggcagcaagtttagaggcgtgactgaaagtcacactgcatcttgagctgctgaatcagctttctggttaccacgggcaacagccgtgttttccttttgatgtcctttacagtggattacagccacctgctgaggtgagtagcccacgctcctggtagatggctccacgtacatgcacagtagcaaaggcgtacctgctgtcagtgttaacgttaatatccttaccccatcggagagcctgagtgagggcgatcaattcagccttttgtgctgaggtgtttgctggtaaagcctgagcccacaacacatctgtctccatggtaacagctgcaccggcctttcgtagtcccttctcgaggaagctgctactgtctgtgaacacggtggcatccacctttcctaggggcacattttgaagatcaggtcggccagtttcagtagtttccaacagttcctgacagtcatgaacaggaatagtggagtttgagtcaggaagtagtgtagctggatttaaacaccatgtgggaggggaagtcaaatgaggctgatctaacagtaaactctgatactccaggatgctttatcagtggcttttttcagctgcctgagctgcttgtttttgtttttcaacctcttgactgtcaaaaaccttttaggctatctctaaaagctgactggtattcattccagcaaaatccctctagtttttggagtttccttttactatctggggctgcctgagccacaaatgccaaattaagagcatggctattttcgggggctgccaggtcaaaaggggtgtaaatccgataagcctcctggaggtgctctaaaaacactcctggtgactcatcatgcccctggacgacttcagtcgccttagacaagtttataggtttctgagcagctccctgaatacccacgaggagataccggtggaaatcgtcaaaagttctccctccacttgagaaatttgggtcccaattaggtcccaattgggtctctaatcactattcctctagcttcctcctccggcctattggttgatgtgaggttgtactttttggcctctctttggatactttccctctcttcagaggtgaaaagggtcaaaaggagctgttgacagtcatcccaggtgggccaatgtgtccagagtacagactccatcagtgaggtcaaagcctggggcttttcagagaagggaggattatgggttttccaattatacaagtcagaagtagaaagaagggacataaaccaggaagggggtggagcactcatcacccagagggacttgtgcctctctcagtggtagtagaggggctacttcctcccaccacggttgcaaccaagaggcaatgggtgatgagcctacaggggacatagccgaggagacatgggatgaccctaagggagtaggctggttttaaggcggtgggactgggtgagggagactctcctcttcttcagagagaggcagtacagggcgagctaaaccggctgagggtcgaggcgaaaacacggtctggctcaggaggaccttggaggtaaaattatgaatggtgcatgagtggagccatggaaggggtgctcctgaccaaactcagccattgatcaatgtagggaaactgatcagggaggccgggagtttcagtaacaacccgccacacagcttgaacaattgtgaggttcagtgacccttcaaggggccactcaactccaaactttggccattctactttgcagagtgtccagagcttgccttttttaaggcggactccataatcctctgagaaaccgagagaaaaattctgcagcatatactggagagggctccaacccttacaaggctgggaggaagtgtttcccctttttttttttttttgaaggcaatttaataagatttgaacatagatatcaaacccagcacagacagagaaactcactccctggggggctggagtatcgaaagaacagaatcaacatgaccagaaagagcagaaaaaccacaacagctaaataccacttgccacatcactgtagctttaagattgagggaggaggactagaggccagcccgagatctcctgggtcagttggatctaggtgttctctctcttcttctagatctgtaccctaaataccttttgtgtctccatgactcaaaggcaaatagctcaaacccagctttttcttttaagggttcaaggagtgagagcagagccaagtcctggagacgctgaacttgctgtcgcactggaaaacgagatgtgtggggtagggggcagggaggaggaaaaggaccacttggatcgtttttaagatgggagagtagccacagaggaacagagtaagaatctaaacgaagtaaagcagtacgagggtaggtttccctacacagtgtgctatttaagggcacaggaaaagttacagaatgaccaaagaggtgagcaaggaaatctgcagggtggctgttttgaacccaccaccagtttagtttagaggaggtccaatcaacctggatgtggggtatgacaatctaaatacaaccatcatggtgccagaaatcccaatcaggcgaatgtttttttacactcattcccgtaacaacacctgacttgcttctggcagaaaagacaggactgtggtggccagcctaaatgattgatgagaaatttaacctcctgtgacaaaaaatcagcactaaggaccttgcagaagttcttacccagacgtcttgggcaatatcgacgtcctgacatgcaaaaccttgacaaccactaaacaagacaatagacaccgaacagaacaataaacataaaacaaacagttgaccctagggcatgtaaacagttatgacagtttcttctttttttttttttagacaaacaaggggagggggtcccgtgatgggatcagtcagatgcccgcctggccgctcccccttaggggacttgggctcctcttagcattgacaggccggtataaacccccggctcggatcgagctatgccggatgctgccttaagccttatgaggtcgccacggaaccgcaggtgagggcccacttgaactccgtagctttcgccgtggagctacaaactggaggacaagcgcaagcccttgtcctcccccattcattcaccattcacacagagtttataacagtttttcttttttctttcccagagattctccaagaaacctgaacaaggaaagattagagatagaaaaagagagagagagagaccagtctgccagaaaccaggactcagtcccccagcatcctgggatgtggactgactcaagggatggcccctgtcagggccacttccctcccagacagagacacagaggcgtctaacagaaaaccagggctctaccctctagcatcctagagaaatgggcagagtcaaaagagggacaccctcatcagggtcgcttccctctgccagaaccaaagtcaaatctgacctacctgaccccggggtcagcagttgaggactcagaggtggaatttttgtgggcacccacatggtagtcgatccgctgtcctccggaagacggtcaccctttggggacctggaaatttttttttcaggtggcactcccccctacaagctggctgtccttccgggggagcacacagcgggcccggctctcgcccggtgacgtttctcccggtgacgtttctcgctggggcctccaaatgtcgtacctgagcgagttagagaaaacgccacactttgagacaaattaaaagtccatttatttagctggccgccaagagatggctaatgctcaaaattctctccgctctgaagaaggggctagatcttcttttatactttggtttagaaaggggaggggaggtctagttaaaacaattttacagaaataaagtaagcaaaaaagttaaaaggataaatggttacaggaaagttaatagttccaggtgcaggggctttaagattattacaaggtgatagacgcggggcttttgggcataatcaatcggatgaattcctcggaactgcggatatagcttgccacagtatcttaacagttaattgcattcttggatgtgctgggagtcagcttgcacaagttaagtccttgaggaaggggctgccagtgaaagagccaagatggagtccatctggcgctcttagctaagggagagtcaattcaggtggaaacaaggctaggtgatttaaggaaagggagagtctaaaaacagggttagtaaaaaccaggttgggcattacactactaagatatcaaaaccaggaacttacttcctttaaaacaattccaaactaactcgctgtgccttacacagaaatttcccccaagaaatatggttttataaagcctgagaagttgttgctattaggacaaacaccaaaactaaaaattggtttaattagcaacaacaaaattccattttaactggctgtccttatcagagacagtccactaaataatacaactggcaaaaagtgagattttgtaaaggttggggtgctttattataaacataacataaaccaggaatgtattttaataaacctcaacctgcgggtcactccctcccaggcgtgcaacaaaacacctgcctagaaatcaaaaggcgttttacccgagtgggctgaaaaagccccgtttttacctttaatctggagacaatacgggtcagaggtcaggaaactacatcagcgccagtgcgagcgcccacgagtccggtggacggatgagaaacggccggggggcagcctgagtcccagttcccgccgtggcaatggccaatttcccacccgtggacgcaaaaggccaggactccacgctgctgaccctccagcgtcccatgtccggcaggcacgtggccgaatagcccaagactgaggactcacacttcccactttgcacctggaggccacctgcagaccaaccttgcgccaggcttccggaaatgggagggcgggcttccggaaacggcggccaatgggaaacgtgatcagatgttactaggcagacagtccgtttccaggcaacacagaagaaaggaacgcgctcagtcagcctcaaatagacggagatttcagccaatggatgtgcaggttccctccacattagccaataagaagtgcttggggcctacctgcctacaagcacagcaaaagctttcctgcgcatttttgcgctggaatggctacctgccgcgccaaatcaaaatttacaatcacccttggtgctgtttcctgcactttcttggagatttgcaccaggcgctggagaccctcccacctggcccatgcctgccacccggtgaacaccaagacccaaccttctgcaccaccagtcttgttgtcagcgaacaggctagtaaattattgaaggggtggcctgcccctccacacctgtgggtatttctcgtcaggtggaacgagagactgagaaaagaaagagacacagagacaaagtatagagaaagaaaagtgagcccaagggaccggcgctcagcacacggaggacctacagggacactggtctctgagttccctcagtatttattgatcattatctctaccatctcggagagggggatgtggcaggccaatagggtaatagtggggagagggtcagcaggaaaacgtgaacaaaggtctctgtgtcataaataagtttaaggaaaggtgctgtgccttgatgtgcacttatacaaacatctcggtgcattaaagagcagtattgccgccagcgtgtctcacctccagccctaaggatgttttctcctatctcagtaagtagaacatacaatcgggttttacaccaagacattctattgcccagggacgagcaggagacagatgccttcctcttacctcaactgcaaagaggccttcctcttttactaatcctcctcagcacagacccttttcgggtgtcgggctgggggatgtcgggctgggggacagtcaggtcttacccttcccatgaggccatatctcaggctatcacatggggagaaatcttggacaatacctggctttcctagacagaggtccctgcggccttccgcagtgtattgtgtccctgggtacttgagattagagaatggtgatgacttttaacaagcatattatcttcaagcacttttttaacaaagcatagccctaaatccattgaaccttgagtcaacacagcacatgtctctgtgagcacagggttggggctagggttacagattaacagcatctcaaggcagaagaatttttcttagtacagaacaaaatggaatctcttatgtctacttctttctacatagacacagtaacagtctgatctctcttttccccacagaagggaagggagggagggagggaaagaaaaagaaaccttaagcattttttacagatgagggttctgctctcccttagttcagccatgctgtgggggaaggggaaggagtgtggtaagatggcagaggaggaaataaaatatggatggcttctgccttttcagttcttttcctcatttcctggcttactgtccctggtttctgactgctttgtggtgaagcttcagaattggagagaaaaagaggccagaattggtggcttatgcctataatcccagcactttgggaggtcgaggcaggcagataacttgaggtcaggttataaatgtttaatacctaaaatgatcaatacctaaaaaaaaaattttttttttgagagggagtctcattctgtcacccaggctggagtgcagtggcgcgatctcggctcactgcaacctctgcctcctgggttcaagagattctcctgcctcagcctcccgagtagctgggattacaggtgagcaccaccacgcccagctaatttttgtatttttagtagagatggggtttcaccatgttggcc[133 bp omitted]gaatgcaaaaaaaaatacagcaaaggcatcattaaaaagcacagtaaacacgattggccaataaacgcatatgaacagatgcttgactcacttgtaatcaaggtaataattttttttttttttgaaaccgggtctcactccaacactcaggctggagtgcagtggcatgatcacagcttactgcagccttgacttcccagactcaagtgatccgtccacctccgcctcccaagtagctgagaccacaggcacatgccaccgcacccaaccaatttttgtattttctgtagaaatggagttttgccatgttgcccagcctggtctcgtacttctgggctcaagcaatcctcctgccttggccttccaaagtgctgggattataggtgtgagccaccgtgcctggcccagtgtaataaatattgaaacttatagcagaggtagggaaatatgaacactgatattcaatgatcaaagggattcaaaactggaacaatggtggagccacaatttggcaataagcagtgaagctgaaagtgtatacagcctataacgaacaatttcatttctaggtaataccttagattcttgactctttaaggaaattaaaaaatacacaaaatgatattcaatatagcatctttattaccacagaaactcatttatgtccttaatcattgtttaatataatatataagcatgtttaacacaaacatatcaaggatcgggctggaatcttttccattctatagaaaagcactaaccatccattaaagcaggtagctactttcagagcatgatatgagctgcaaaaaattgccctgacttatgccgcccccaacacaaccactcaccatatctaaaattacacccttgaagacattcattgtggttatggtagcatctaacaaagctgttcctattccagatattcggactgagaattccacaataaatttgagatacactcagttaaataaaaatgtctttactaaatctttggcaaactgatcatgtatactttgaattcctcaaaagtagatttttattttattttatttgagactgagtttcactcttgttgcccaggttggagtgcaatggcaaaatctcagctcactgcaatctccatttcctgggttcaagcaattctcctgcctcagcctcccaagtagctgggattacaggtgcaagccaccacgcccagctaattttgtatttttagtagagacagggtttcaccatgttggccaggctggtctcaaactcctgacctcaagtgatctgctcgccttggcctcccaaaatgttgggattacaggcgtgagccaccgtgcctggccaaaagtagatgttttatgttttgcttcatttgcctattttcccaagaaatctttttttcaaataccatcgagaattaatattccttgaagcaaacttctggagaatgttgaatttaggggtcaaacacaggctttctggaggtatttggtgcttgggaaaagaaacactgacctattagcaaagatagattttgtaataaattctaaataaactttatttagaattgtgaaaaatagaatcttcataatgaaggtggtctagaatttgctttcagaaactatcttcatctaatttttattaggattattttaccttgcagaattaattggtaaaatctttaggattatctattccttaaagtttttataagtatcagattttttaaacagggagttcacacacacacacacacacacacattttttgttaatctatttgggttatacggtgagttaattgtaaaacatattccttttgggggaaaaatgcaatcctacatttttacttgtactggaatgaatatacacgtttgtgcatgtgtgcatgtatagttttaccatattatgtttattatttttgagacaggttctcactctgtcacccaggctggagtgcagtggcgtgatcttggttcaccgcaacctctgcctcctgggttcaagcaattctcctgcctcaggctccccagtagcttagattacaggtgcccgccaccatgacaggctaatttttgtatttttagtagagatggggttttgctatgttggtcaggctggtctcgaactcctgacttcaagtgatccacccacctcggcctcccaaagtgctggggttacaggtgtgagccactgtgcccggcctagttttgccttataattttaaaaatctgcttgatataatctagagttgtgtctcttttatcatcattaatactctaaatgtattatctttcattttctcttccttgattataactgccaaaatctaatcactattaacattgaatcaagtctaatattctccattctcttaatttctactttctactgttacttggctgttcctttttttttttttttttttttgacagactcttgctctgttacccaggctggagtgcagtggcgcgatctcaactcaccacaaactccgcctcctggattcaagtgattctcctgccttagcctcccaagtagctgggattacaggcatgcaccaccatgcctggctaattttgtatctttaatagagatggggtttctcagtgttggtcaggctggtctcaaaatcccgacctcaggtgatccacctgccatggcctcccaaagtgctgggattacaggcatgagccaccgcacctggccacttggctgttctttacttgggttggttttattttgttgtttcctttttcttgacggaaatacttattcattccctcaacacattcatctgtgtgacaggcctggtgttgctgctgtgggtaagtgaagaagatgaagactgtatccacaaataagatttccttaccacattacagggcattaatttgtcactgaacagaactttgattatatctgacaaggttagatgtgcaggcatctcactgtcattcatttctacatagtctataattttggttttgattttaaacattttattattgaaatttcaaacacatacaaaagtagaaatattagaacaataagtctccatgaacaaaacactccacttaaattatcaacatgttgccaatttagtttccagctctctttgccaattatttcttttgctagaatattttaatccaaatgtgtctatcttcatttcatagtatgtatctcatatcatacgatcttttattttttataatcacactgacataatccctaaccaaattaatatatgtaaatatcatttaatatttagtccatgtccacacttccctcactgtctccaaaatggctttttatgttttgttcaaaccaggtccaagtaatgccaacatactgaatttagttgatatgtctctttaagtctcttttaatctgttaatggttgcccttccccttgtattttcatgctacctgttagttgaagaaatcaggtaatttgctctgtagaatttcacacattctggatctgtttggcttcttccttgtggtgccctttatagccagccctccatatgtgcagattcaaccaatctcaaatagaaaatactcaaaaaaaaacaataaaaataaaatacaataaaaataatgcaaattgaaaaatacagtataacaactatttacatagtatttacattgtgataggtataagtgatctaaagataatttaaagtatacaggaagatgtgagtaggtaatatgcaaatacatactatgccattttatacaagggacttgagcatcctcagattttaccatcagtggaggatcctggaaccaattccccatggataccaagggatgaccatatactgttcatctagtccctgtctgctttcagttcattattccagcaataaggctttgtagatggtggtgtggacttcctattgcattacgtcaggaagtgtgttgtctgatagacccatttttattaaggttaaaacagatcaaagggttcagaggtggccagtttgatagatccaccataaaaatctcgctataaaatatttcacctattagttgtagtacccattgaagatcatgttttctggacccattattccattaaggtctagaaaatggtgatttttctaatcctctaattccttctagatttattagacttcttcaaaaaagaaaaacccattcaaaaaacaaattttttttttgagacagggtctcactctgtcacccaggctggagtgcagtggcacgatctcagctcactgcaaactctgcctcttgggttcaagtgatcctcccacctcagcctgggactacaggtgtgtgccaccatgcctggctaaattttgtatttttagtacagacagggtttcaccatgttaaccaggttggtctcaaactcctggcctcaagtgatccacccaccttgtcctcccaaagtgctgggattacaggtgtgacccctgtgccaggccaaattcatttgaatttgatgaacttctggtgaccctgaaatttggttcacatgggaaaaggaaactaaatgacaatttttcctctgatttattgatttcaagaataatgagttgggctgggtgtggtggctcatacctgtaaccccagcacctttggaggccaaggagggaggatcacttgagcccagaagttcaagaccagcctgggcaacatagtgagaccctttctctaaaaaaaaaaaaaaaatttaggtggaagaatcacttgagcccaggaggaacagggtacagtgaactgtgcttgtaccactgcactccagcctgggggacaaagtgacaccctgtctcaaaaaaattatacattggtgctctagcatctttcataggttaccaaattatgcagccacaatcaagtaaactatcaaattattggtgggatcacatcaaaaactcaacttgaaacaactcctactggttgaagatatggcattttgagcatccaaaagtatactgacttatagaatgatgttttgtttctttcccacaggagttttatacacacacataaatatacacaacaatattaaattcctaggtggttaatttcttttaagccacatttttgatagtttctaattaattttaaactgtggtcagacaacagggattgtaagccttttgctttctggaattatgggaaaatcatttcctatttccctctaattcttcaacagctgtattactagtgacctcacattcatgaaattcatttttggcatgaaatttctaatgcagctcaagtgctgaagaacttcctacattcactacaatctaaattttacctagaataaattatgtttaataatttctgagaggtgacaggaggcatttctacatttattatgtctacagatcttccttttacgtgaattcactaatactaatgacaataataacaattacagataatatttacagaatacatgctatatgactgtgattcctccaagtattaactacttactccttgcaacaatcctattccacagtgtggcaggctgactctaaacaggccccccagtggtcctgtctccaggacttattcacactcttgtatcatcccgttctcttgagtgtggactatcctagtaacttacttctaccagtagaaggtgagggaatgttacttccatgattagattacacaagatggtaacttccatcttgctagcagactgtcctcccttttggcttgcatgccttgatgaagcaagcagccatgttgatgaggctattgtggccaggagctgcagtcagcgttcagccaacagccagctagaaactgagaatctcaatgcaacaggcctcacggaaatacattgggtaacaactatgttagtctggatgtggatccttccccagttgagccttcagatgagacctcagccctggctgaaatctgtagccttgcaagagaccctgaagcagaggacccaactaagtcatgcctatactcctgatccaaattataagatataattatatgttattttatgctactaagtctgtggtaatttattacgcagcaataaataactaatacatataagtactattattaccattttacaagtcagcaaaatgaggcacagaagcttagtatcttgtccaataaatcaaactggtaatcaagtggagaaagggagataatgacagataaggctaaagattttcctacattcattacattattctctcataggaatttgctgaagataaaccatgtttaaatggtgttggaaggcttttaaatcaacatattctttctctaatataaaatttattatgcttggaattgagcatgaaacacattttctcaaaaatgaattttctgatgttctgtaacatcatatacatttgaaggctttcttctattaaattccattatgaatcttctgatgctgagtaaggtgtgaatgctgtctaaaggccttcttacactccttacacttgtagggcttctcaccagtatgaattctctggtgttgagtaagaaatgaataaagtctaaaagccttaccacattccttacattcataaggtttctcaccagtgtgaatactctgatgttgggtaagttgtgagagcagtctaaaaggttttctacattccttacattcataaggtttctcaccagtgtgaatactttgatgctgagtaagttgtgagagcagtctaaaggcctttccacactcttcacattcatagggtctctcaccaatatgaatgctctggtgtgaaataagctgtgagtaactactaaaggtcttccaacattccatacattcatagggtttctcacgagtatgtattctctgatggcgaactagttgttgtcttaatctaaaagtcttcccacattccttacattcgtagggtttctcaccagtatgaatactctgatgaacagtaagttgttggcatattctaaaagcctttccacactccttacattcatagggtttctcaccaaaatgaattttctgatgtactctaaggtctggaccacatacgaaggctttcccacattccttacattcatagagcttttcagcagtatgaagtctctgatggcgtgtaaggtgtgtacactgtctaaaggtctttccacagtccttacattcatagggtttctcaccagtgtgaattctctgatgtcgagccagttgctgatgtactctaaaggcctttccacattccttacattcatagggtttttcacccgtatgaagtctctgatgttgagtaagttcttggagcactgtaaaggccttcccacactccttacattcatagggtttctcaccggtgtgaagtttgtgatgtcgaataagatgtgcacgctgtctaaaggcctgcccacattccttacacttataaggtttctcaccagtatgaattctcaggtgttgactaagtgttgagcgacgaataaaggtcttcctacactccttacactcatacaccttttctccattatgaacgatctgatactcagtaagaaaattgtgccttttgtaagtggtcattttttcagaggtaattttcacttgcccaaaatatccctcttgttgttccttttccccctcaatcttgcttttgcattcccaatcattcctaaaaatggaaccctgaaggctatagcttttaattctttccattatatcccactgaaatgaatatatttcataaatgtccttttctggagataaagtattggtcctgtatctggactccaaatctgaaagaaaacaagaaagcaaatacatactgttttcctgttccagaaagaaaaaacaaacaaacaaaaaaaccacttctatagagaaaaggcacctaaaataatgcctgttacaaattgaatggattagacagatctcaaacatagacatttctgccacaatcttatatatgtgtacctaaaaaaccttatcttctacaaaagtacacactaaaaattactgtgttcagaagaaaaataggcccggagcaggaccacttaattttttttttttctttggagatggagtctcgctctgttgcccaggctggagtgcagtagtgcgatcccggctcactgaaagctccgcctcccgggttcacgccattctcctgcctcagcctcccaagtagctgggactaccggcacctgccaccacgcccggctaatttttttttgtattttttagtagggacggggtttcaccgtgttagccaggatggtatcgatctcctgacctcgtgatccacccacctcggcctcccaaagtgctgggattacaggagtgagccactgcgcccggcgaggaccacttcattctatgcctttttttttttttttttttttttgagacacagtcttgctctgtcacccaggctggagtgcagtggcacaatctcggctcactgcaacctctgcctcctgggttcaagcaattctcctgcctcagccctcctagtagctgggattacaggcacacacccccaagcccggctaatatttttgtgtgtatttttagtagagacagggtttcaccatgttggccagactggtctcgaactcctgacctcaggtgatccgcccgcctcagccttccaaagtgctgggattacaggtgtgagccaccatgcccagccaattctatgcatctttaatcagtagaacactaacaaataaaatagttgacatctaaagggataaaccaaaagacacctcagcacttcatgtgtattaaaatgcacaaaaataaagagacaatgctagacttcaggtcctgagacactgtacatgaaaataaagcccagagccagtgaggacatcattaaggtgggagtaaggtaaagtgcagcctgtctttagataagaggccatgcaaggttgatggtatattcctctggggagggagacctgggtgcagacatttattattaattttcttaaaacgggtgaaagggctcctgataataaagcatcatgtagaaggcctttgtctttcctactgaacattataaatatacctccactaagctagctccactggactagaaaaattactcataagccaatcatctacattatacacaattcttttgccactattctgctaatgtgtaccatgggacagattgcactctcatcattttgaaaaagggaaacacagcaaataaagagtccaggagtgcaggcagggctggtgattaggaaagcaagtcaaatcagtgaagccctgttttaagtgtggataagaatcacctagagatttgtttaaactatgcagaggtgtttttaactgactgaaaccatctataggacaaagtcctgggcaagtaattgttttgttcttgtttatattcttcaagaaattattgggatgctgatcaatatttgagtctctctgtttaaatgttttcaatgctatctctttaccattataataaaatataaatacctgagcataaataataaagctgctgcttgtcaacaaatatcttctcccatttgttctctctgttcatagcatactggcctctttcaacgcacaaaatgccccacaactgttccaaataaataggactcttcacaggctgctccttctttgaggaatcctctgacactgcatggttggctggttttcattctcagcctcaaatcaaaatcacttcttcacaaaggctagtcctgctggccctatttaagtctatgcactttacgcttgtcttactccattttctgttgcttataatgaagtatctgaaaatggataatttataaagaaaaggaatgtattattattatttctactctactctgacggattaaggagtttatttcttaacaattatgggggctgagaactccaaagttgagggactgcatctggtgagagccttcttgctggtgacaaccctgcagagtcccaaggcagcgcacagaccatcaatgggtaatgggggctgagtgtgctagctcaggtgtctcttttgcttcttacgaagccatgtgtcccactcccataataactcattaatccattaagccatgaaagcccttgtgacccattcacccctcatagatcccacccattggggattaagtttcaacatgagttttggaggagacaaacattcaaaccacactctcttagcacactctttctcttttctttgtttttttgagatggagtttcttgttgcccaggctggagtgcagtggcacaatctcagctcactgcaacctctgcctcctgggttcaagtaattctcctgcctcaacctccccagtagctgggattacaggcacccaccaccaggctcggctaatttttctgtatttttagtagagacggggtttcaccatgttggccaggctggtctcgaactcctgacctcagatgatctgcccgcctcggcctcccaaagtgctgagattacagtgtgagacactgcacctggccatgcacattctttttcatatttataacactttctccaatttttgaatcatatgtttattaattttctcatattattctgttagtttagttagtctgttagttaagtgttatccttgaactacccccagggcagaaacaatctctattatcaccattaattagcaaatcccaaatacataatagatattaccagtttaattctcataattatataatcattaattaataggtatatctgcctctaatctttataccagaggtccccaacccccaggccacagaccagtccatggtctgttgggaaccgggctgcacagcagaaggtgagcagcaggtgagcgagcatgaccgcctgagctcggcctcctgtcagatcagcggtgactagattctcataggagcgtgaaccttattgtgaactgtgtatgcgagggatctaggttgcacactccttatgagaatctactgcctgattatctgaggtggaacagtttcatcccaaaaccacgtaccattttctcccgccccagtccatggaaacattgtcttccacaaaactggtccctggtgtcaaaaaggtagggactgctactttataccatattataatgatttacttatctctgctagaatttatactatgacttatcaatgctacacttactcaaacttttgttggccgggcactgtggttcacacctataatcccagcactttgggaggccgagggggcagatcacctgaggtcgggagttcgagaacagcctgacccacttggagagaaaccccatctctactaaaaatacaaaattagctgagcgttttggcaaatgcctgtaatcttagctactcgggaggctgaggcaggaaaattgcttgaatctgggaggcggaggttggggtgagccaagattgtgccattgcactccagcgtgagcaacaagagtgaaactccatctcaaacaaaacaaaacttttgttccttcatatcctccccatgtgtggtcctatccattcccatgtagccaacgcaactaaagtattttttttcaatcatgctaacattgaaaggcttatgaaatcctgagcaaaaggtcatggtaaatgtcaagtacagcagaatgactatcaaaaatggaagggcatctggggtcacctgaatgcaacagagtaaaaataaaggctatgttggatgtgggcttgaagatcatgatccagatggcgtactttcatgaagaaaatcgaaaatgctgaatgaagtaagcaaagacatgggttgagatggtataggaaaggaggagaatttttttctgtgactacagtataaatgtgtaaaactggtgaaatgacccaaagaatagtttgtgatcactgcaagacaaaataggaaaaaacaaaatcatgaaaccaaaagacatcttcacttcagattttaaaactctttcctaaatatagaacagtaatattgaaaaatacattatagagaacctatgaaatatagctacagatctcagaagaaattttatagatacatttaaattcttagagcaatagaaatgaaggaaaatatatgagtatcccacacaaaagttagaaaaagaacaacaaagtatactgaggaacaaagaatgaagaaatagattaaaatgaaagcagaatttcattaattagataacagaaatgaaagacatataaaaaatccaggttggccaggcacgatgactcatgcctgtaaacccagcactttgggaggctgaggctggaggattgcttgagcccaggagttcaagaccagtctgggcaacatggcaaaaccctatctctacaaaaaattagccaggcatggtggtgcttgcttatagtcccagctactcgaaagactgagggaaagaggatcgtctgagcccgggaggcgggcattgcaatgagccatgattatgccactgcctgggtgacagagcgacaacctgtctcaaaacaaacaaaaaacccaggttgtttggaaaacaaaaacaaaaacaaaacaaaaaaacaaaaaacaaaaacaaaatcagtggaacataaccattagctaagataataagagaaaaaggaaagcattcaaacaaaataaaaaatggccactagctattcagtgacaactccccatagagctctcactttttttttttgagacagagtcttgctctgtcgccaggctggagtgtagtgtggcgcagtctcagctcactgcaacctctgcctcccgggttcaagtgatcctcctgcctcagcctcctgagtaggtgggactacaggtgtttctaccatgcccagctaattttttgtatttttagtggaaacggggtttc[133 bp omitted]aagcactacctacctttgttctgggatatcttttcaagaatgtttctatactataacaaacagccttgcaaggtagagataacgtctctgtctggatcaataggcaggttcgcttgcttgttcaggataataaaggtaatgtctccttccaagctaaggctacgtacacttattgcccacgatgaatgatttgggttcttcaagctcagtgttccttttctataaggcagctcactgcatgctcaggaactatctagacccatccttatcagcctcatgtgacttgcaggcaaggaggaactgctggctgtgctgagagcaatcaaatcctttgtctttgactgagagcatgtgtttcctgccagcatccatgacactacggcaagctaacttgtcagcttgcaagtagggtgaagttgtagaaataatatagttcttgacacatgtaaataactaacaaaacagaatattttgaaaattataagggactactatgacaaccaaggctaattactaacaaagtatagaaaaagtattcaaggctgggcgcaatggctcacgtctgtaatcccagcactttgggaggccgaggagggtggattgcttgaggtcaggagttcgagaccagcctggccaatatggtgaaacctcatctctacaaaaactacaaaaattagccaggtgtgctggaaggcgcctatagtcccagttactcgggaggctggggcaggaaatgacttgaacccaggaggcagaggttgcaatgagccgagatcacgccactgcactatagcctgggtgacagagtgaggctccatctcaaaaaaaacaaagaaaagaaagaaaaagaaaaagtaatcaaagacccactccaaaaattattttgaagattatcaaaacttgagaaagcactcaattatatttaaagtggcccagaacattttataaagcctaatactccaagttatctttgagtataaaaatgaaatcaggctgtgcgcagtggctcacgcctgtcaatccagctctttgggaggccaaggcaggcagatcacctgaggtcgggagtttgagaccagcctggccaacatggtgaaactgtcatactaaaaacacaaaaattagctgggtgtggtggcacgtgcctgtaaccctagctactcgggaggctgaggcaggagaacctcttgaacccgggaggtggaggttgaggtgagccaatatcatgccactgcactccagcctgggcaacagagtgagaaaaaaaaaagtcttctttctctttgcccacacatattcccttagaaaagtcaatttctaatggctttctttggtcaccagatagtcacatagaataggcaaagcctacagaacagaaaaataagtaattgggtgccatgtaataatactacagggatttgaattaaggattgacatttcattttaaatgaaattgtgtaactggcttttaagtacattttaaaaggattgggtaggtacttgggtcgatacttctgtttgaggtgttcaagccacaaatatacaaatatatagctatcactgataaacctgggaagctgacccctttaggctaagttggccttcatgagatcagaatgcccagcacctgtgtatcagggtaacaccagctgactccttgatatagaggttctggaggatgtcttaccaggacagtcagggaagtcaggattttgtttgtttgtttggagatgaagtctcactctgtcacccaggctggagtgcagtggcacaatcttggctcactgcaacctccgcctcctggattcaagcgattctcctgcctcagcctcccaagtagctgggattacaggtatgcaccaccatgccctgctaatttttgtatttttggtagagacggtttcatcatgtttagccaggctggtcttgaactccagagtcaggatttgaccccgcctgtgctgcaaccttctgggacctcctgtaggaagtgctatacctgctttggaagaagcagctctcagaggaaataacaccaatgggttcctccccaagagatcccagaaaccagaggtggaacttaagctggcttgtattttttttatcaatgctctgactctgtatctcagtggaaaattctattcaacaagaagaggagggctgggcacagtggctcacacctgtaatcccagcactttgggaggccgaggtgggcagatcgcctgaggtcaggagttcgagaccagcctggccaacgtggtgaaaccccatctctactaaaaatacaaaaaattagccgggtgtagtgccacatgcctgtaattccagctacttgggaagctgaggcaggagaatcacttgaacccaggagaggcggaggtttcagtgagccgagattatgccattgcattccagcctgggctataagaggggaactctgtctcaaaaaaaaaaacaaaaaaaaaaaaacaaaaaaaaaaaaacaggaagaacataatttctcctctagaactaaaaaatatttgtattttatcagaataatataccagtttaattaataattcccttaacgccctttgaaaatgtgaatttacaggctgggcacagtggctcacgcctgtaatcccagcactctgggaggctgaggtgggtagatcacctgagctcaggagtttgagcccagcctgggcaacatggcaaaaccccatctctactaaacatacaaaaaattagccaggcgtggtggtgtgcacctataatcccagctacttaggaggctgaggcaggagtatcacttgaacctcaggaggcagaggccacagtgagccaagatggcaccactgcactccagcctgggtcgcagagcaagactctgtctcaaaacaaaaaaaaaatatatatatatataatatatatataatatatactatgtatattatctataaatattaaaatgaaaatgaaaaatctaatggacagctttaacaacagcttagacttagcacaagagaagactagtgaatagagacatggatttgaagaagatttcaaggttgaaaggaataaaaaagaacaatagataggctgggcgtggtggctcacacctgtaatcccaacactttaggaggccaaggcgggcagactgctttgaactcaaactccacaagtttgagaccagcatggccagcatggtgaaaccctgtctctactaaaaatacacacacaaaaaagtagctgggtgtggtggtgcttgagcccgggaagtggagtctgcagtgagctgagattgtgccactgcaccccagcctggaaaacagagccacactctgtctcaaaaaaacaaaacaaacaaaaaaaaaaaacagaaaagaacataaaagatacatgggacaatgttaaagtgtctaacatatgtgtaactcacacagagaaaagaacaaaaatgagaaacaaacactatctgaagatatagtaaccagaattttcccaaactgacaaaagacatcaaacccaagatttaaaaaaattcctagctgagcctagtgactcaggcctgtaatctcaacaatttgggaagccaaggagggaaaactacttgaggctaggagttcaagaccatcctgggcaacatagggagacccccatctctaaaaaaatacaaaagttcactgggtgtggtggtgtgcacctgtggtccaagctacttgggaggctgaggtgggaggatcacttgagcccaggagggtgaggctgccgtgagctgaaatcatgccactgcactccaacctgggcatccaagcaagatcctgtctttaaaaaaccaaaaaaaaacaaaaaacagcttcctaaatacttcaagcagatgacaacacaatatccaccacactacaaaactacaccacaatataattgggatttttacatttcactgcaatataaaattaggcacaccacagtaatctgttaaaaaaaaatccaaaagcagctaacgggaaaaaatacctctaaaacaatatctctgaaggagttacaatataagtgacaaactactactcaatggaaataatgaaagccagaagacaaggaggggatatttgctaagagaaaataactgccaactcagaattctattctccacaaaaataaagacaaaattttgtaccctttaaaaattaagacgtaataaagatattttctaataaaacctaagataatttattgccagtggacacaataaaataaatactaagtaagttctttgggtacacagaaaatggttccagataaaagcaatgcaatgcagaaaataataaggagcactgtaaaaggtaaatgtgtgggcaaatgtaaaaaaaattcactacttattacaataagaaattaatgccctgtggggatt[131 bp omitted]gcgaaaccccgtctctactaaaaactacaaaaattagccggcatggtggtgcatgcctgtagtcccagctactctagaggccgaggtgggagaattgcttgaacccaggaggcagaggttgcagtgagccaggatcccaccactgcactccagcctaggcaacagagcaagactgcatatcacaaaaagaaaaaaaaaggcatatgacaacaaatgcacaaaaaactgaggacacataaaaggaattaaaatactattaagggttgcgtacagtggcttacgcctgtaatcacagtactttgggaggctgagacaggaggatcatctgagaccaagagtttgagaccagcctggccaacacagtgagacccccatctctaaaataaaacaaattagccgggcatggtggtgtgtacccgtagtcctacctacccaagaggctgaagtaggagaattgcttgagcccaggagtttgaggttgcagtgagctatgatcacaccactgcactccagcctgggtgatgcagtgagaccttgtctctaa[137 bp omitted]tggtgaaaccccgtctctactaaaaatacaaaaaaattagcggggcgtggtggtgagcgcctgtagtcccagctactcgggaggctgaggcaggagaacggcgtgaactcgggaggcagagcttgcagcgagccgagatcgtgccactgcactccattctgggcaacggagccagactctgtctcaaaaaaaaaaaaattctattaagatccctacaattttgaacaagatataaagaagctaatttcagattcaatgcaataagtaaataatgtacttgttattgtctaaggcaaccacaagaagaaaaataaatgtatgtataatgatcatgttataaaaggaaaaactagaataaaaatgcttgattaatccaaaaaaggcaggagaatgaaaaaagtaagaacatattaagcaaacagaaaaacactgggaagacagcagatttaaacccaaatatgtaagaaaattaatgaaatgtagatgcataaaatacatcaattaatagacaaaaatgactgggcacagtggctcacacctgtaataccagcacttcgggaggccaaggtgggagaatcccttgaggccaggagttttagagcaacctggcaacacagtgagacactgtctctacaaaaaatgcttaaaaattagccatgtgggctgggcgcggtggctcacacctgtaatcccaacactttgggaggccgaggcgggcggatcacaaggccaggagatcgagaccatcatggctaacacggtgaaaccccgtctctactaaaaatataaaaaattagccgggcgtggtggcaggcgcctgtagtcccagctacttgggaggctgaggcagaagaatggcgtgaacccgggaggcggagcttgcagtgagccgagatcgcgccactgcactccagcccgggcgacagagcgagactctgtctcaaaaaaaaaaaaaaaattagccatgtgtggtggtgcgcacctgtagtcccaactactcaggaggctgaggtgggaggatcacttgagcccaggaagttgagccatgttcatgtcactgccctccagcctgaggcaacagagcaagaccctatctcgaagaaaaaaaaaagatcttccttacccacactggggatgggatgctgtttccattactggaggcagcctagtgcaggctgttgcagtacaagcacagtaagggaagtattcagagaagagcagcccagcatgtaccaggcaaacctatcaggaatctaacattttctctcagccttccactagtaccattctcagcaaaaccactatcatcttcaatgtggacaaatgaaatagcctcctagtgggtcttcaaactatccatcatgcccttattcaatctattctctgtagagtggtaattatttaaaaatcagctcatgtaggccgggtgtggtggctcacgcctgtaattccagcactttgggaggccgaggcaggcagatcacaaggtcaggcgttcgagaccagcctgaccaacacactgaaaccccatgtctactaaaaatacaaaaattagctgagcgtggtagcgtgtgcctgtaatcccagctactcgggaggctgaggcaggacaatcgcttgaaccaggaggcggaggttgcagtgagccgagattgcgccactacactccagtctgggtgacagagtgagactccatctcaaaaaaaaaaaaaaaaaatcagctcatgttactcccctgctcaaaaatctccagcagctttctactacacttaaaataaaaaaaagtcagatgcagctgagtgcagtggctcacacctgtaatcccagcactttgggagactgaggtgggaggatcgcttgagcctaggagttcaagaccagcctgggcaacatagcaaaactcccgtctctacaaaaaatacaaaaattttccagcggtggtggcatgcgcctgtagtcccagctacttgggaggctgaggtgggacgatcacttgaacccaggagttcaaggctgcagtgagtcatgatcacaccactgcactccagcctgggcaacagaacaagaccctgtctcaaaaaaaaaaaaaaaaagccgggcacagtggctcatatctgtaatcccaacactttgggaggccgaggcaggtagattacaaggtcaggagttcaagaccagcctggccaacatggtgaaaccttgtctctactaaaaatacaaaaattagccaagcacggtggtgggcacctgtaatcccagctacttaggaggctgagacaggagtatcgcctgaacctgggaggtggagattgcagtgagctgagatggtgcaactgcactccaggctgggcgacagagagagattccatctcaaaaaaaaaaaaaaaaagtcaaatgccttctcctatgatatacaaaccattacatgatctcgctcttgcctaacattatcttgtttctacacctttcacttaccttttgaataagcatcttaatcatcttgggcttcttgcagttcctcaaaaatacaaagctcccctcagcccacccaaagcctttgtatttgctgttctctgccaggaatgccgttgctttagatattcatatggcctgggctcttttttcatgtcactattcaagtatcacctcctcaaaatgtcctgaccaccctatttaaaacatccctatctctacttgccaacttccattctcacccaggctggaatgcagcagcgcgatctcggctcactgcaacctccacctcccaggttcaagcgatacttctgccttagcctcctgagtagctgggactacaggcatgtgccaccacgcccagctaattttcgtattttcagtagagacaggtttcaccatgttggccaggctggtctcgaactcctggcctcaagtgatcctcccacctcagcctctcaaagtgctgggattacaggcacgaagccactgcgcctggcccttcttacttttcttaatacttgtccctacctaatattatgtattgatgtacttgtttacttcatgtccttactcctattaagatgtaagcaacatgattgctgggacccatgattctcattcacatctgctccactggtgtccagcacaacacctagttccaactaggcactcaagtatttgccaaataaataaaggaatatatttctagccaatgaaagacatatcaacctaatcataatagaagctagaaagaaactgggtcctaaatatggactgaactctgttcccctaaaatttgaatgttgagccctaactaactgtatgtggagatggggcttttaggaggtaattaaggttaaaggaggcctagaggaggggtcctaatccactagaattactggccttgtaagaagaagaagagggccaggtgcagtggctcgcgcctgtaatcccagcaccttgggaggcagaggtatgaggatcacttgagcccaggagttcaagaacagcctagggaatacagggagatctctgtctctataaatttttttttttttaaatagctaagtgtggaggcatgtgccagtaaacccagctactcaggaggctgagacgggaggattgcttgggcccaggagttcaagactgcagtgagctgtgatggcaccattgcactccagcctgggcaacacagtgaagccctgtctcaaaaaaaaaaagaagaaaaaaaaaggaagagagtgacctctttctctctctgtgtcatatgaggacacaacaagaaggcagctgcctgcaagccaggaagagagacttcaccagaacctggcaccctgattttggacttccagcatctagaattgtgagaaaatacatatctggtgtttaagccacccagactatggtattctgttacagcagcttaagatgatacagatttaaatagagatgaaactgtagtcaccgatcaaaaaaaagagtagcccctctctttgtcaaatcttttccccattcccctcaacagcatccttaaaattttttttattttaaaataattatagatccatgggaagttgcacaaaatgtacagaaaagtcctgtgtagacttcacccagcccctcccagtgttaacatcttaggtaagtatagcacaatattcaaaacaagaaattaatggggctgggcgcagtagctcatgcctctaatcctagcactttgggaggctgaggtggatggatcacctgaggtcaggagttcgaaaccagactggccaacatggtaaaactccctctctactaaaaatacaaaattaggtggtggcgcatgcctataatctcagctacttgagaggctgaggtaggagaatcgcataaacctgggaggcagaggttgcagtgagccgagatcccgccactgcactccagcgtgggtgacagagcgagactgtctcaaaaaaaaaaaaaagaaagaaattaatgttggtatattccatagagcttacttagacttcaccagttctatgtgcactcatgtgtgtttatttgcatagctctatgcaattttatcacaggtagcctcgcaaaaccaccaccaaaatcaagatactcacctgtaccatgactgcaagatttcctcatgttacccctttctaacccgaaccatcctctacgccctacatccctacccttggaaaccactaatttgtttttccatctctatgtgattttgcaaatattacataaataaagtcatgtagtgcataaccatttgtgattgattttgtcactcagcataatttccttgaaattcacccaagttgttgcatgtatcaagagtttattgcttactgttgctcagtttattcatggtattggtgtgcctttcaatcagttttaattgggctacttatcatttagcactgagctgtgtatatactagatactggtcccttgtcagatatgttttaccactattactctcccagtctgtgactcacccattcatctgcttattggtatattctgatgagacaaagttttcaatttggataaagtctaatgtcttaattttttatttatttattttgagacagagtcccactctgtcacccaggctggagtgcagcggtgtgatcttggctcactggaacctccacctcctgggttcaagcaattgtcctgcctcagcctcctgagtagctgggattacaggcgcatgccaagacgcccagctaatttttgtattttcagtagagatcaggtttcgccatgttggccaggctggtctcaaactcccaatatcaggcgatctgcccgccttggcctcccaaagtgctaggattacagatgtaagccactgcgcccggtctgatttttttatttttatggttattgttttcactcaagaaacctttgcctactcccaagtcataagttgggacactcatcactgtcctgtttccctctaaaaactttatgattgtagcttttatatgtaggtctaaaaaccatctcaaattaattttggtatgaggtaaaagctgagaggtttgtttatttgtttccccagttattccagtactatttgttgaaaagcctttcttctccccattggaatgctttggcatctttgtcaaacaataaatgaccctttagtgcgtgtgtggcagggtatgtttctaggacctctgttgtgttttgttcggtaatctttgccaataacatactgtcttgatcactgtagttttaataaatcctgaagtttttgttttttgtttttttttttgagataagagtctcactctgtcacccagggtggagtgcagtggtgtgatctcggctcactgcaacctccgcttcccaggttcaagagattctcatgcctcaccctccccagtagctgggattacaggcttgcaccaccatgcctggctaatttttgtatttttagtagagatagggttttaccatgttggccaggctggtcttgaactcctgacctcaggtgatccacctgcctcggccttccaaagtacagggattccaggcatgagccaccatgcccggctctgatctatctatctatctatctatctatctatctatctatctatctatcatctatctatctatctatctatctattttattttttgagatggagtcttgctctatcgtctgagctggagtgcagtggtgtgatctcggctcactgcaaactccgcctcccgggttcaaccaattctcccacctcagcctcctgactagctgggattacaggcgtgcgccactacatccagctaatgtttgtatttttagtagagacggggtttcaccatgttggccaggctggtctcgaactcctgacctcaactgatctgcctgccttggcctcccaaagtgctaggattatatgtgtgagccactgcacccggcctgattttttaatattaaccttatatcccatgaccttattgtgatttttcaattattacttcgaatagttgttgtcttgattccttaggactttctatgtacacaatcatgtcatctccaaatacagacttatgtcttcctttttgatctttatgtctcatttctttttcttttgataatggatttttatagtttataatgtattttttaaataggtgccccttaccagattgaggaagttcccttcaatttctagtttgctgagagctttttatcatgaatggatgttggattttgtcatatgctatttttacatctatgaagatgattgctatggtttgaatgtttgttgcctccaaaactcatgttgaaaattaattcctaatggcaatattgagaggtggggtttttaagaggtgactgggtcatgagggctctgctctcatgaatggatgaacctattcatggattggtgagttaatcgattaatgggttatcacaggattgggactgatgactttataagaagaagagaggcctcaactagcacatttgcatgttcagcccacttgccatttgatgccctgcaaagcctcggaattcagcagagtccccaccagcaagaaggccctcaatagacacagccctttgaggctggacttctcaacctccaaaacggtaagaaataaattccttttccttgtaaattactgaatttcaaggtattctgttataaacaacagaaagtgaactaagacaatgatcatacggtctttcattttttctgttaatatggtgaattaacaggtagaaagaaatcctaatcatcatttttgtatatcattatatttgatttgttaatattttattaaaatttttgtatctatgtatggaaaagatgggtttatgctttttttgtaatgtctttcttgggttatggtatgagttatgttggcctcataaaatgcattccttttctgaaggagtttgtataatactgctgctatttcttccttagatgtttaatagaattcaccagtgaaaccatctggggctggcattttctttgtggaaggtttctgataatgaattcaattactttagcagcataagggtattcaatttcttttttatcttgtgtcagttccggtaagttgtacttttccagaaattttaaaatttcatttaagttatcaaatttattggcataaagtaattcatggcattctcttattattcttattattcttcttttttggagtcggggtagagtctcactctgtcactcaggctggagtgcagtggcgtgatcttggctcactgcaacctccgcctcccgggttcaagtgactcttgtgtctcagcctcctgagtagctgggactacaggtgcccgccactatgcccagctaattttcgtatttttagtagagacagtgttttgctgcgttggccagactggtttggaacccctgacctcaagtgaccagcctgcctcggcctcccaaaacgctgggattaccagagtgagccaccacgcccagcctcttattattcttttaacggctataggatctaaagtgaaaatccctctttcattcctgatgttagtaatttatgttctttaaaaagagagaatgtaaattactaggtgtttaccatctttgctgatcttttcaagaaatcaatttttggctttattaattttctttatttcttttctattttgctgatttctgctcttatatttatttattttttcttctaccaggaatagttcttctctttaaagtaggatagaaatatgaaagatgagaaacagtgttgcattcaagatcaatagaaagttcctttgctagtccaggcttaaaagatcttaatttgcttcaagtcccaagccctgcctccataggccaggggctttttgaagagagaccccaacatctcaagggtgtgcctccaccctaatcagtttagctattacctgcagtagtgatttctcaatgcctgctcagccctcactcaccagggcagtatcttcttgtcccttccctcacaaccatcccaggttccttcctttcttcatccaataaggtaatcacatctggtttagaaatggaaggtcctgcttaaaagaaaaatgtgacatggaattatacaccagaaaatctttagatttagatttggttaaatttataattaactacagatcaatatggcactttataaagcctaggagcgaagaattgcaagggagttgaagaatgctcatattaaggtaacttgagggtcacaaggaatagcctgtatgaggttaaattaagtatactaaggccattatattaaccatctggtcaagaacaggccttaatataatttaacctcacacaagctctgttgaaaggcagtattgtgtagagggaagaacacagactggatccagactgcctggcttcacatcctgcctttgtttctgtgttacctagcaaattattaaccttttgtgtctacgttttctcaaataaaatgaagataataatatcttctcatagcgttgttgtgagggttaattaataatgaacaatgcttagaataatgtttaagcccaaatatatggtgatgtttattaacatatacacataatatatgtattagctattagctatttactgttatcattttgatgagtgcatactaaaaggttttttgagacattcccagatcttttctaggatattcattcaatgttaaatgccaggcttttagattttaattttcaattacaaagtaggtagaactgcatatgtctgttacaggaaacagaatgtgtttcagggttttttctgtttgagacagagtctcactctgtcacccaggctggagtgcaatggcgcgatctcaactcactgcaacctcagtctcccagcttccaggaattctcctgcctcagcctcccaagtagctgggattataggcatgcgccaccatgcctggctaatttttgtatttttagtagagatggagtttcaccatgatggccaggctggtctggagctcctgacctcaagtgatccacccgactcggcctcctaaagtgctaggattacaggcatgagccaccatgcctgaccttgaggtttttttgagatggagtctcactctgtcgcccaggctggaatgcagtggcgtgatctcagctcactgcaacctccgcctcctgggtttaagtgattctcctgcctcagtctcccgagtagctgggattacaggcacgtgccaccatgcccggctatgagttttaaataacctttctggatccatctcacactatgttctacagattcctttgatttttagagaaactcagaacccctatgtctaggtattctacttgcagatggtgtgaagcatttatgtcaattctgagctccaatataaggtgaagtctggtttcttgaacaatgcttttgccatattcaaatccatccccttggatactaaggaaatcaggaattacagagtctgaaggaagtctgaagggcatagcagactggacatgatgaaatggagaggcctagttccaacctgacaaagcttaaatcattcctttgagaatagaaagtagttttagagagtttttctaaatatagtcctgaaattgacagcagagaaagctaatatcatttgggataaataaccttacctagtgaaatgaagttgctgtagttctcccacattacatccctatataagtccctctgagcaggatccaggaattcccattcttcctgtgagaagtctatggccacatccctgaatgtcactgaaccctgaaaaaacaaactcaggtattacttgtgaaaataaattaaatacttttaaaatggaaagaggggagattgaggattgcattgcagagaggggtcagatagcatgcaaacagcattgggctgaaaacttgtgacatgagtaggggccagtaagaaaattagtatttctcaagcactgagcctacatgttcttgaatagtcctgtggctatagatatgattacattttcatccaaacatttctagaaatgagtacataacccaaaaaaatcctaattaaatgaaatagtgcacgcaagccttttgaatactatgtgcctccaccataaattctttaaaaatatgaggtcttgaggccaggtgcagtggctcatggctataataccagcactttgggaggcccagatgagaggatcatttgagcccgtaagttcaagaccagcttgatcaacattagcaagaccctgtctctacataaaaagaaatttaaaaatttaaaaatttaaaaaaaaagaaatatgaggtcttgggctctcttttccctttaatgatcatttaaaaacattgataaaaatttatcccacatgtgctacaaaatccaagaagacagattcaaattcatcacaaactcgggttttattataaacactttctcttttataaccaattctttagtaaactttcaaaaattcgttcgatggcagtctacatttttaatatattagattcttttttctttagatattttaattcaataaaatctcgaaagtcttccccaattctcaacgtctacaatatctaatctttatggatgtgaataatcttcttgcttgtcactatctatcatctcttgaacattgtttttttgttcctgagttacaggacactgaatcatgaagatatcataaagatatcacctggacaccattatcaatcatattcttttcttttcttttttttttttttttttttttgagacggagtctcgctctgtcgcccaggctggagtgcggtggcgtgatctcggctcattgcaagctccgcctcccaggttcacgccattctcctgcctcagcctcccaagtagctgggactacacgcatccgccaccacgcccggctaattttttttgtatttttagtagagacggggtttctccgcgt[137 bp omitted]aaagacatccggccatatctggagacaattttggttgtcacaatcggaggaaagggtgtgagtgttacaggcatctaatgggtagaggccagggacactgttagacatcctacaatgcacgggacggccccctacaataaaagactccccatcaaaatgtcaatagttcaggccaggtgcagtggctcaagcctgtaatcccagcactttgggaggccaaggcaggcagatcacttgaggtcaggagtttgagaccaaccttgtcaacatggtgaaaccctgtctctactaaaaacacaaaaatcagctgggtgtggtggtgggagcctgtaatctcagctactcaggaggctgacgcagtagaatcacttgaacccaggagacggaggttgcagtgagctgagatcacactactgcactccagcctaggcgacagagtaagactcggtctcaaaaaaaaaaaaaagtcaatagttccaaggttgagaaatcctgctctagaccagcacatcctgtaaaaatacacaatggacctcgttcctggcattcttctccgcaggaggaaatctccattgattgaggtatctatttgcagtcctattctgatcacatcctattcaccctgttggtgaagaagggatccctgccctaaaaagtacaagacaatcaaatagcccacactggacagatgagattgacagcaatttgttcgatgcatatattcagagcctgagagaggacatcatacatcacgcaggggcacaaggggattgcatttaagaacagcatgaacaagcaggggtatgggaggcaggctttacagtaataacaaggtgaggtgttccctggttcctgcagtggtatgtgattggcttgtttgaataattccataggctagcagggaggtgaaacccattaggttgaggacgacgaggggtgtaactggtctagctcataggagaactagctgggtaggaagcctttcccgctgggtgtgggcatatcgggtaagagcaggggaactcatggttaggcctttagggtcttgacaaagttgtcaaggcacacatgaaagtttaggccttatcttataaggcccaattacatccctacccaatccacctaaaagccttacatagtatagggtctcaacatacataaaaactaaggtcagtcaacactaaatcctatcctatatacttgaaaaactcagatctgtggagaagtttagagttttccctataagcagtcagataagaccaaattctctctttcatcaaatcacagatcttaaggaaagctcaaaatagggacctcccacttaacatcagtaatccattcctgaaaatcagacattctaacgattaaccaggtacctattttcccatcattttatttactttctttccttccttcctccttctttctttctttgctttctttcctttttctttttctttttttttttttttttttttttttttttgacagggtctcactctgttgcccaggctgttgcctaggctggagtgcagtgatgtgatcacagctcactgcaacattgaattcctggcctcaagcaatggcctcccaaaggagggattacaggcgtgagccactacacacggcctcccattatgtgaaatcagagcattataatgagttatatgtcaattccatccctccaactagctttgcacattttcctccaatatagaactatgggacacagtgggtcagtacacacacaacatctttgcttttagtattttaatcatctcttttactaaattcatttttctcatttgcttggtttctttctccacaattttcttcaatacttttccaatcttttaggaactcattttacactagacaaaaatgagggctatatgtgaagcacagtatggaaaagtgtttccaacaagaacgtgatagcgggaacggctgacactcaggatggtgctctgttacctcctcagtcactagcagcaccaggtacacacatgcccttgaatgatagttatacacatttcaaaacatctgcagatggttccattggtctaacaactgtatttgggatataacaagatttttcctggatgttatttttgttttttaaaaaaaagcattgtattggatcaggtgcggtggatcacacctataatgccaatactttgggaggctaaagtgggagaatcacttgagcccaggagtttgagttcagcttaggcaacatagtgggaccccatctctacaaaaaattttaaaaattagccaagagtggtggcacgtgcctgtagtccccagtactcaggaggctgaggtgggaggatcacctgagcctgggaggtcggggctgcagttagttgggatcataccaccgcattccggcctgggtgactgagtgagaccttctgtcaaaaaaaaaaaaaggctgggtgtcatggtggatggtggctcatgcctgtaatctcagcactttgggaggtcgaggcaggtggatcacttgaggtcaggagtttgagaccagcctggccgacatggtgaaaccccgtctctacaaaaaaaaacacaaaaaatagctgggagtggtggtgggcgcctgtaactccaggtactcagaaggctgaggcaggagaatcgcttgaacccagaaagcggaggttgcagtgagccgagatcctgccactgcactccagcctgggcgacagagcgagactctgtctcaaaaaaaaaaaattgtattgaactatatgattccacttgaacaaagttcttgttttgttttgtctttttgagatagggtctggctctgtcatccaggctggagtgcaatggtgcgatctcggttcactgtaacctccacctcccgagctctagtcattcgcccacctcagcctcctgagtagctgcgtctataggtgtgccaccatgcccagctaggttttgtattttttgtagagacacggttttgccttgttgcccgggatggtctggaactcctgagcttaagcgatctgcccacctcagcctccccaagtactgggattacaggcatgagccaccacacctgccccacttgaacaaggttccaaaaataagcaaaattacattatagtgttcgacatcaagacagtggttaccctgggcagtaggtgggtggggagtgactgaaagcatctgaggtgatttcctttcttgacctgatagcatagatgtactcaatttatgaaaattcatccagccatacacttatggtttgtatatttttttgtatatatgtcattcctccacaaaaaatttcaaaaacgttttaaaaatgtcatattgtggccaggtgcagtggctcatacctgtaatcttagcactctgggaggccgaggcaggcagatcacctgagatgaggagttcaagacaatcctgtccaacatggtgaaatcccatctctactaaaaatgcaaaaattagccaggtatggtggcgggcacctgtaatcccagctacttgggaggctgaggcaggagaattgcttgaacccagaaggtggaggttgcagtgagccgagatcatgccactgcactccagcctgggtgataagagtgaaactctgtctcaaaaaaaaaaaaaatgtcatattatgtattggggacacctattttttctatgtaaaactaagacaaaaagcactgtactgagaaaaatatactttttctggagtttaagttttaaaatgaaaagcggttccactggaagatgttaacaggaggacattctgcagagaatgccttcaattttctcaaggcatctcatttccgctttctcacagctattgacagaagattttgtaggtaggagatgctcaacattagtgggagaagagatagccacataggatactgggctatctgtcccaatcctcacaggagggaaaagaactggagtaggttcttttttttttgagatggtgtcttgctctgtcgccccagctggagtgcagtaacgcaatctcggctcactgcagcctctacctcccgggttccagcaattctcctgcctcagcctcctgggcgcctgccaccacactggctaatttttgtatttttagtagagacagggtttcaccatg[135 bp omitted]agtttcagaataaagaatgaatctatatacatgatacagaaattgacagtatttcgaaaaggacagagaaacattaacttacatgggccatggttttagaactgcaaaaactggtcagtccttttcaagatttctctgttggagaactatggagtcctgataagccagagctgaaagaagaaaaagaaaccatgaaataagctgcgccacagagctcccaaaatgatgtacatcataaatatgaaaacttttttctcttccattccttctcccaaactacttccattggcttttccaaagtaccacccaccactatgcccatccctatcctatacccacatataactggggaaaagtatagggagtctaaagagaaacaagctctggccgggcacggtggctctcgcctgtaatctcagcactttgggaggccaaggcagttggagcacctgaggtcgggagttcgagaccagcctgaccaacatgcagaaaccctgcctctactaaaaatacagaattagctgggcgtggtggcacatgcttgtaatcccagctactcgggaggctgaggcaggagaatcgcttgaacccaggaggcggaggttgcggtgagctgagattgcgccattacactccagcctgggcaacaagagcaaaaaagaaagaaatacaagctctgaagaaataggtgacaaatgatgaacttggtgtagaagcctagctacttctgcaagaggatttctgaccaggtcgccctctagcaatgtggatctggtccagacactggattactcagatttgttctgagcagctcctcctcactctaggacaacttttcaggactgagaagggccctgaatcctgcccctagaatcctgcctgaactacctaaacacagcaactaaaagaccacacagattgaacctggcagcttctgccaatgtgaggctacccttgccttccccagccaggaaagctcgccactccagttttccaatcagggcctcccataccatgacatccttcaccactccttctcttttattgattaatttttttttagatggaatttcactctgtcacccaggctggagtgcaatggcacgatctcagctcactgcaacctccatctcccgggttcaagtgattatcctgcctcagcctcctgagtacaggtacatgccaccacgcccagctaatttttatatttttatatttttagtagagacggggtttcgccatgttgaccaggcttgtcttgaactcctgacctcaggtgatccgcccgcctcggcctcccaaagggctgggattacaggcgtgagccaccgtgcccggccccactttccttttagtatccaagctggggacagaagggattcatgattcctgcagttggtcaacaatattcattgagaacctctatgtgttgggtacttcatacacattgtcagttgtcctcggtactgttctgcaatgtagtgctctccttttaatagctcaggaaactaatgcccaggggtcaaatcagttaagttgccaacatttgttttgaatctacatttctctaactaaaaagcccgtttcttttttctttttttggttttgttttttttgtttgtttttgcagacagagccttgttctgtcacccaggctgaactgcagtggcatgaccatggctcactgtaacctctgcctccagggttcaagcgtttctcctgcctcagtcttccaagtagctgggattacaggcgcctgccactacgcccggctaatttttatatttatagtagagacagggtttcaccatgttgcccaggctggtctcgaactcctgacctcaattgatccacccgcctcagcctcctaaaatgttgggattacaggcgtgagccaccacacccagcctaaaagccagtttctctttcaactcaggtatttgtctctgaagcaaggatttctacttcaccaggagaaatctgatcatcagcaattcactaaaaaaaagaggaataactaacagtaggttttgttttgttttgttttttcaaaaacacggtctcactctgttacccaggctggactacagtggcatgatcttggctcacagcagcctcgacctcccgggctcaagcaatcctcccacctcagattcccaagcagttgggactatagttgggcaccaccatgcccagctaataatctttcaaaaaatgctaaatctcagaagatagcaaaatagttctttccatctatggtccacctgcagaaacatcagtttgagcaattatccatcaacaaaaatgccttcacaatagctaaggcaaccaggtgagagatcgcagtactgggttgtagcacaataataagaaaagaagcattgaagagtgcaggaaggacggctcgacattacccatgtcacccctccccagctcaaggcagcacagtgtagacagaggtattgcccacttggggaaaagtcagggaagtgagcacagaactttgcctgttccctaacaccaggcccgccatagtaaaacccagcaacagggagactcccaaccccagactccaggccagtagccacagactgaccctctagacctgctctggcatcaggaaagatcatgcagcccaggcttcaggcttgcatgatgaactccatctccaggctgccaccaccatcaggctgacatcagaggccctgggctccaacagcccttagcaacaggcaagcctcagtggcctctgcaatcaggcacataacagtatggcaccagtcacagtggtctcaggctttgagcgtgccccagcactgcaccagccagagtggccctgggcttggggcatgctatgtgcaacaccagagaatgtggttccagccttttggagcatcccagcactatacccaccgtagcagccccagccttaaggaccaaaccagacaggctgcccagaaccactgcatgggctattgatgggctttcccagatgaacctcattctgcaaagactggaataaatacacagtcctttcaagtgtgcagacatcagtgcacggtcacaaagatcaacaacaatcagggaaacatgacatcgtcaataggacaacataaagtgccagtgattgactctaaagaaatggagatgtctgaactgcctgataaagaattaaaacaggctgggcacagtggctcacacttgtaatcccagcactttgggaggccgaggcaggcggatcacgaggtcaggagatcgagtccatcctggctaacacggtgaaaccccatctctactaaaaaatacaaaaaaattaggcgggcatgctggtgggtgcctgtagtccagctactcgggaggctgaggcaagagaatgccatgaacccaggaggcggagcttgaagtgagtcaaggtcgcgccactgcactccagcctgggcgacagagcgagactctgtctcaaaaaaaaggaaagaattcaaataactgttttaaggaagttcagtgaacttcaagaaatacagagaactttaaaaagtgagaaaaacaatatgtgatcagaatgagaaattaaatagattgaaataatttttaaaatcaaacataaattctggagctgaaaaatacaatgaaggaaattttgaaaatgcaagacagaacatcaacagcagaattgaccaagcagaggaatgaatctgtaaacctgaagacaagttatctaaaaatatacagttggatggaaaaaaggatgaaaagaaatgcagaaagtttataggattcatgggacagcatcaaaatagcaaatatttgagcagtaggagttaaaaagggagaagagaaagataaacaagtagaaagcttatttaaagaaataacagcaggcacagaggctcatgcctataatcccagcactttgggaggccaaggtgggattacttgagtccaggagtttgaaaccagcctgggcaacatagcgagactcatctctacaaataattttttaaaaataagccaggtattgttgcatgtgcctgtagttccagctacatgggcggctgaagcagaaggatcacttggacccagaagttcaaggttgcagtgagctatgatcatgccactacactccagcctgggcaacagagtgagatgaaaggaaaggaagggagataagaaggaaggagggatggagggagggagggagggaaggagggaaggaaggaaggaaggagaaagaaagaaaaaagagaggaaagaaagaaaaagaagaaaggaagggagggaggtagggaggaaaggaggaaggaaggaaggaagaaaggaaggaaggaaggaaggaaaaaagaaagaggaaagagaaaaaaagagtagcaaaaaactttccaaacctggggaaaggtaagtatccaggtatggcccaaagttagaaggaagaaaataataaagattagggcagaaataaatgacacagaccagaaagccaatagaaagaatcaataaaattaagagttttttttttgaaaaaagaaaaaacccacaaaattgacaaacctaactaagctatactaaccaagagaaaacagaaaatattgaaaatattcaaataaaactagaaatgaaaaaggagacattacaactgatacaacagaaatagaagagactattatgaacaaacatacaccagaaaattggataacctaaaataaatgattaattccctgacacatacaacctaccaagattgaattatgaagaaataaaaaatctgaacaggctgggcatggtggctcatgcctgtaaccccaacattttgggaagccagtcattatgacaaacagtatggagaggcctcaaaaaactaaaaatagaactaccatatgatctagcaatcacactactgtatatatccaaaggaaatgaaatcagaatgtcaaagagatctctgcactttcatgtttattatagcattattcacgatggccaacacatggtgtccatcaatggatgaatggacaaagaaaatctgctatgtaaataaaatgtaataccattcagctatgataaagaaacaaaacctgtcatttgtgacaacacagatgaatctggaaggacgttatgttaagtgaaataagccagaaacagaaagataaacaccac[137 bp omitted]catggagaaaccctgtctctactaaaaatacaaaattagccgggcatggtagcacacgcctgtaatcccagttactcaggaggctgaggcaagataatcacttgaacccgggaggcggaggttgtggtgagccgagatggcgtcattgcactccagcctgggcaacaagagcaaaactccgtctcaaaaaaaaaaaacaaaaaaacaaccaaacaaacaaacaaacaaaaacaacttaatctcatagaagtagagagtagaatggtagttaccagaatctggggtagttgggggtggggggaaatggcaaggttgaggagatgttggtcaaacgatacaaaatttcagttacataggaggaataagttcaagagatctattatacaacatggtgatatagttaacaatatattgtattactgaaaaaagctaagacctgtaaagtgttctcaccacaaaaatggtaactatgtaaaaggtaattcatatgttaattagctagatttagacattccacaatgtatatatactttaaaacaccatgatgtacatgataaatacatgtaattttatctgtcaaaaaataattttaatactaaagctcggtattaagaaaatgaccagcctgggcaacatagtgagaccttgtctctacaaaaaaattttaaaaattagccgggcatggtagcgtgcacctgtagtctcagctaccaggaggttgaagcaggaggatggcttgagcctgggaagcagaggttgcagtgagctgagatgatgccactgcactcaagcctgggcaacagagtaagaccccatctcaaaaaaaaaaaaaaagaaaaaaatgaaagaaaaaagaacagaaaaaaatgaaagaaaaaagaaaagaaaaaaatgaaagttaaagcaaacaaaatgtacctttttacaatgactgcattgcaagacctaaaagactgatgatgccctatagtagcaaggttgtggggacaccgacactaggtcggtccacatttagagctatgtgaagcagcatttcaatcctgtaaactctgaatcagaagctccacttctgacactaaagggactgtatctgtacataaagattatgcagagctatggccggggcagtggctcacacctgtaatcccagcactttgggaggccaagacaggcggatcacctgaggtcaggagttcaagaccagcctggccaacatggtgaaaccctctctctacaaaaatacaaaaattagccgggcatgatggcaggtgcctgtaatcccagctactcgggaggctggggcagaagaatcgcttgaacccaggagacggaggttgcaatgagccgatgtcgtgccgttgcactccagcctgggtgacagagggagactctgtctcaaaaaaaaaaaaaaaaaagaaaagaaaaaagattatgcagagctatgctgacagcatggtttataatgaattaatggattaaagttgaaaagaacctaatttcggaatgattcaataacctgttgtttatccataccattgaaaatgatgcaaccattaaaaatgatgttgccttaattttgaatgggtgaagccagtgtgttaaaaaaagaaaataccagcatgtgtagtgtgaaactattttgacagaaaaaaaaatcatgtttccctagcaggaccagttaaaatgtttacagtcacagccagcaacacgcaccaccacattaaacagagtgtgagcctgaaatacccaaatacttcaaataagactttcccggctcaagttctttcagtcttccttttaactgagaaaaaaagctaaggatactgtaaaaacagatgctgttttttctgagtggcttttttttttacttcggcttctcattcatgaaccaactctatgatttaatttgcccatgtgtgttggagtacggcctagaaaagaatggcaaaaagtctctgactgatgtcttctaagcactgaaggcagccccatgctgcttcctttcacatcttcctgataaacaggtttattttgcttctgaaccagttcttttggctaagatgcctatgaagccctccagcagatgttgggtctccttgaccaactggtctcactttgcatataacatcattaaaataaaaactgtaaggcatacatctgtatgaaacccagttacctccataaagaccctgtagcttcagtataatctggacaaaacttgacagtgtgtgccatcatgagattgatatctcttcccttcatcgtgagattgctgaataaagcaggaaggaatttttttttttttttttttttgagacaaggtcttgctttgccacccaggctggagtgcagtagcacgatctcggctcaccacaacttccacctcctgggttcaagcgattctcctgcctcagcctcccgagtagctgggattacaggcgcatgccaccacacccagctaatttttgtattttcttttttttttttttttgagacggagtcgtgcccaggctggagtgcagtggtgcgacctcggctcactgcaagctccgcctcccgggttcacgccattctcctgcctcagcctcccgagtagctgggactacaggtgcccgccaccatgcccgggtaattttttgtatttttagtagagatggggtttcaccg[140 bp omitted]ccaggttggtcttaaactcctgacctcgggtaatgcacctgccttggcctcccaaagtgctgagattacagacatgagccaccgcgcccggccagatttttttttttaagtatgcataatgatgatatttggtatactgttgtaattaccaatatatgcttttatttttctgcatgatattagacaggttactttccagttccccatatgaaatggtgagaactacagtttctacctgaaaggattgttatgagaaataaataagatactacatataaggcacttagagtagtaaataagcatttcataaaagtcagctatattaataaagatgaagaatactacatatgcttcttcccacaattatttttaaaattctactcaggcctgtaatcccagcactttgggaggccaacacaggcggatcacttagatcaggagttcaagaccagcctggccaacatagtgaaaccccatctctactaaaaatataaaaattagccaggcatggtgatgcatgcctgtaaccccagctacttgggaggctgaggtaggagaatggtttgaacctggggcgggtggctgcagtgagccaagatcgtgccaccgcactccagcctgggtgacagagcaaaactctgtctcaaaaaaaaagaaaaaaaaaaaattcttcgcagccctgctcttgataggcaatccttcttgattatcaacaatttacaaaaggagggtacaaagataaaacaaatgtggtaggataccaatttttggatctgggtgatgaggaaaaatattaaattacaacctaacggtaacaaatctactgtgcacttattatgtgccaagcattagctaagggttttgcatatattaattcctctactcagagccatcctatatagcagggtctatcattatcctcattttgcagatgatgaaactgtggcacaaagagattaaataaattgccccaagctcaggcagctttaagtggcaggttgaggactagaacccccctactttagctccataacccatacgactgtcactgtactaaactgcatctcatgagacctgataaatacgtggcctgaaacactcatgctgtcaaaaacttcaagccactttccaaatttctactgtcttcccttcccttctaataaccccttcccttgttaacacagacctctccactaaaaaccccatcgtattgtcactccttaaaagcctcaaaagcagaaaagatcctgtcgccaatcaaaccacctcctttccctgcttttgaactcagggcggtggggatcaaagagacctagtgggtaattccatctaaactgtaaactcctcaactaatcaccatcgaatgaaagttctacgtggtggctcacgcctgtaatctcaacactttgggaggctgaggtggaagaattccttgactccaggagttcaagatcagcctgtgcaacataaggagacctcatttctacaaaaaaatttaaaaattgcgcgtgggaccacgtgcctgtggtctcagctactcaagaggctgaggtggaaggatcgcttgagccagggaggtccaggctgcagggagcgagatcacttcactgcactccagcctgagggacagagtgagaccctgtctctaaaaaaaaaaaaaaaacttaagtaacaaaataaagctctgcagttagcttctcttcaggaggtttacttccagaccatccaaatgattagaaagaggcagctcataagagaaactaaattactgccaaatgctcatgtcaatacctactggaggccgggtgcggtggctcatccctgtagttctagctacttggcaggctgaagcaggagaatcctgcttgaacccgggaggcggaggtttcagtgagcacatcgtgccactgcactccagcctgggtaacagacccagactccatctcaaaaaatacaaaaaaaaacaaaacaaaacaaacctactggaaaggggtaggaattggaatctaccttcatcaccccatcattcactgggaaggaaggccaaagcaccaggtcagtggacaggacatttcaggggttaaagtctaactagctgaagattaactggaacaagcccgcatagtctgacaaaatcatatctattgactggcagaaagggagaaaattccacaggaagggttggaatagaatggacgagagagacgagaaaagctctttcgtaaacggttgagttccagctgaaagattctaaggaggatctaatgacagctgcaatctggaatggctgctgtttccgaggtgagattaggagaggcagggattaatgagatattgaatgcaatcatgagtgtaatcaagagggtatccccagtaataaaatgaaaacagcaaagcaagtctagaacatcactggtaagaaaactgtaatctctcaaagagggagtcattatgccattttacaactactgcaccacctggggagaaatcatgttttctattaattttgcaactggctttatctgtctcttccttcctagcctgattaatgacagagctgcttcattgttcagtccgagctgattttcattccacagaagaggaaagcaaatgcccccacgcccagaaaaaataaaaattacacttcatggaacaaaacggaaacacaaactcatctggatgttgacttgtctatatgcaacagcaatcatttcctcctctccccgctgccttcctaaagaacagcaggattgggaaaggagacgggaatcttgagaccgcgggcctttcctggagccggccttggctgagcaggacacacccccgctagcgcacttgctccctccgtctactgcgcgcaaaacccgatggaaataacagggagcctggaataaagctgaccctttcccgtatcagagcgaaaggccaggtacacgaagacggggctgggatctgtctccgagttccccgcagtttccatgggagggagctcgggtaaagctgtgcaatctgcagttcttcagactgcgtctttttgtttgggggccttcattcactccggggttcctgtatctaactcggagccattccgggccgctggacctgggcggctctgaagcgagaaggcagaggacgcaacagggcacccggcgcccagtcagcgccacaaactccacagctactgcctcctggctcacactgaggtctgcgccgcccccgcgccacccccgcgcccattgcctcggtgcaagcgaccaactcacctctcggagccgacaccagcagcgaagccggaaagaactgcgagcggaggcctgtgggaaatgtagtccgccgatgggagggactggttccagccccaacgggctgcgcggagtgcgcatgcgcgggggccggagccccgggtgcgctcggggcgggaaggccctccgcgctgcgtggggctgaggcgagctcgggcttgcgtttgcttttgtcgctgaggaagacttttatttgtttattttcttgagacagggtcttactctgtcgcccaggctggagtgcagtggcgtgattagagctcactgcagccgcgacctcccgggctcaagcgaccctcccacccgagcctccagagtagctgggactgcaggcgcgcgccaccacgcccaactcattttttaagtttttatagagaccagatctccctatgttacccaagccggtgtcgaactcctgggcttaaaagatcctcccgcctgagcctcccaaagtgctgggactacaggcgtgagccaccaggctcagccgcggaggatttagaaagaagttttggcaccagcagatgcctaatatgtgtactaaacacctaccagttactcactgcatacacccaagcaaggtgtgggcacacatcaggcatgcaatgaaaatactctcaaagcccaccagaacctggagcaggacgtaaacctagaaaggtcgctcgtgctcactgccctctccctttctcccactctgtctctgtctctgtgtgtgtgtgtgtgtgtgtgtgtgtgtgtgtgtgtgtgtgtgtctcgtatctcctgcagttgtgaatgtattgttctactaaaaatacaaaaaattagccgggcgtggtcgcgcgcgcctgtaatcccagctactcaggaggctgaggcaggaaaatcgcttgaacccgggaagcggaggttgcattgagctgagatccgccattgcaccccagcttgggcaacaagagcgaaactccgtttcaaaagaaaaagactaactggagaggtctgtctccaatgagactgaatttgtcctgtcctgcgttccttcaggaaagaaatgggataagcccaccagggaccaccctgaggcatcttctgtatcccaaattctttgatatattagttaatacatgaaagaatttgttctttccttaagaatataaaactttagaagatatttgaaaatgcctcggcaatctggtttcattttgcaaacaataggatatgcatgaaataggagataaatgaaaaatctgagctactttataactactaagaaggtggccagacgcggtggctgacgcctataatcccatcactttcggggggccgaggcgggtggatcacctgaggtcaggggtttgagaccagcctggccaacatggtgaaaccccgtctctactaaaaatacaaaaaaatttagctgggcatggtgacgcacacctgtagtcccagctactcgggaggctgaggcagaagaatcgcttgaaccagggagacggaggttgcagtgagccaagatcgtgcagctgcactccagcctgggcgacagagcaagacgccgtatcaaaacaaaaacgaaaacaaaacaaaacaaaaaaaactactaagaaggccgaaggcccaaagtatttttttaattcaaaatcacggtcctatgtacatgtttacaattaaatttatgtaaggaaatcaacactccattaaaaaaacaataaaaagaattattaaaatagctcctccatattctctgttttgactaagtttttttttttttgaaacaaagtcttgttctgtcaccctacctggagtgtggtggcacaatactgtctcactgcaacctcagcctcccaggttcaagggattctcctgcctcagcctcctgagtagctgaaatgacaggtgcccaccaccacgcccagctaattttttgtatttttagtggagacggggtttcac[131 bp omitted]cactaggggctaaattcttcacaccctctctggtgaggagactgctggtgaagataactaactgtaggtcattttccttgtccaacagccccagagaattaacgcctgacttcactgaggtacgatggagggatttttggaaagggccctgctctgctctgtgtcaaatgatggggcacttggtccaatatcatgctcactgaccttctgaaataggattttcttcagattgtttctcatgtcgtttagtttgaaaaaagcgatttggaccttcaattcatcataatcatgcagaataagagcatttctttcagagagtttcatttcttttcttagtatctaaatctgtactattaatattttcagttgcctctcagacatccgcagtttctcttagtaggaaaaaaaaaaaaaaacccacgtgtcaaatgctccatcatttgacacagagcagtgtcctttgtaaaaaacccttccattgtacctctaaaacctgtcattcta[131 bp omitted]ggggaaatcccgactctacaaaaaaatacaaaaattagccaggcatggtgatgcacatctgtaattccaactactcaatttttttcatatatatatatatatatatatacacacacacacatatatatcatatgtatatgattttagtaactttgaaatcataaaaactaaagatgcctcagcaggaattaaatccatgttatttctcaatatatttctggagtcttcatttattccaaaactatatcttgtggatgtacttcacattaagtttgcagattgagaaagtggcccaacatataccaaaccttgtgttttaatcatttgtggtaatatcgtataatttatgacctcaacttttgttaaataccttcatggcaaaggcactatcagaagctgctgcaaaacctcacaccatcagcactggtgaaggagaaagccgttgctttctgctttcttctgtcttcctaatcttgcatgagtttatctcactggaagaacatagatcacatctggaattctagaggcaagagggtctaaaaattgtagtgctgaggcttccagcctctgtagcacaaaaaagagcatggggcacagaagaatacttataacaaaacaacaacaacaaatgatatccagcacacttggttttttaaacaattttttatttttattttttagagatgaagtttcatctcgtcacccaggctggagtgcaatggcgcaatctcaactcactgcaacctctgcctcccaggttcaagcgattcttctgcctcagcctcccaagtagctgggactacaggtgcgtgccaccatgcctggctaattttttttttttttttttttgtatttttagtagagacggggtttcactatgttggccaggctggtctcgaactcctgacttcaggtgatccacccacctcggcctcccaaagttctgggattacagatgtgagccactgtgcccagccggttttttaaacaatttaatatcatcatttaaaatttggcttttttctcaaaatttctcaaaaaaaaaaagaaaaaaaatttgttttgctaccccaatgctagaaagatactctacattttctcctgaagcccttcttgctttaccttttacgattagatcactcatgcatctggaattgatttatgtatagtgtgaggtaagggtcaagacgaattttttatcaaaacagatacacaactgatccagtgctttttattgaaaagaccaccatttcccaaccacatggccgaggaaactttatcacaaattagacaaccacatatatatagagagagagatctacttcagggctctttattttgttccattggtctatttgttcattcttgctcatcgaacattctggttcattctaacatacctgccttaatgactacagtacaacttgtcacattaacaaactcaaggagaaaaacatcatatcaatgagccaaaaaggcatctgactatatttagcagatatttctaataaaaaaaaaagttaaacaagaactgagacaactgagctacaaaatctatttatctcagacctagagtaaacattacaccaagtaattttcattaaattggagaaaatgaccagatgcctggtatcaccatgaatactaaaccttgttttggagactctattacaataacaataatttaaaaaataatcactatatttagaaaaaaacaaaattatatctatttgcagttgacacacctgattgcctagaaaaccaagagtctagtaaaaaataaaatttaaaagattattaggtaataatgaaagctatgattgtatccacatttaacgtattcatatgacaatatcaacataaatacaatatgggagaaggtaagtccatttataacaaaggactactatctagaattttattttttaagaatcttataattcttatattttaaaagcttttttaaaggaacacaggcaaagacataaattggcaagttacagcgtttagccaatattcagatgtgaaaatatgcccaattcactattaaccaggaaaatattactatgcataccagaagtaaggatataaggaaataaggaaaacatatttcactggttgaagggattgtgcactgggagcatactgatgctctctacttctatgacagtatctagtgaggttgaaagtaaatattaactatgactgagcaatcctacttttgataaataccttagagaaactcttgcttatgtacagtaataaacacagacctattcaataaggtatttttcacagtgagaaaatgcttatcacctaaatattgatcaataagaaagtttaaatacatataatgtatatataaaagataggactagtgggctttctattctattgaaaagtatcattcaaaaaaagcaagcagctggttacaaagcatgatgggagttgctttcctcaccataccagtaatcatacatctgccataatgctgacattttcatcttcgaagtccttttggttatcgcagcatctgccaaagtagaatcacatctgcaataggtattgggaatgggagttctatggtgaagtctgaattacactgagttaaataaaataaaactccattttctttcatattgataggcacataatgtgactttttcccccaagaaatatagtacacagagctctcatacatgtttcacaaaatcatttccttcaagtaggattaagtactagtgttctgtggaacatagtttcagaaattttgagtaaaggtactgtctccagaagacctctgttaatgtgaaaatgttacctaagaggagaaacacattgtcctattagcaaaacctaattttattatagcacttaaaatagtcttcttcatgttacattttactgtttacaaattaaaaaccatgtgaaatcttgggtggacaagatgtattattctagatgattaatgactaattaatgacatctgcccaatctgagcaaactggacttggaggtacaaatcttaatctatgaatagagtgacattacagagatttggttaaaaataaagagttgtggcaatacttacttttattttgtggaaggtgctgtggtttgaatgtgtcccccaaagttcatttccaagtttttgggagaaacttgatccccaatgcaacaatattaagaggtgggactgttaagaggtgattaggccatgaggagtctgcccttaggaatggattaatgttgttaccacaggaatgggtttgttatcacgtgagtgggtttcttataaaagggtgagtttggccccttttgctggcttgctctctctctcaccccctttgcccttccgccatgagatgacacagcaagaggccactcataagatgtcagcctgtcaatcttgggcttctcagtctccagaaccatgagtcaataaatttctgtttgctgtggattactgagtctgtagtattctgttatagcaacacaaaacagactaagacagaaaattggtactggaaaagtacgcagttgctataatgaataactgaaagtgtggaagtggctttggaactaggtaatgggtaagagctgaaaaagttttgaactggatgtcagaaaaagactattgctgtgggtggaatgttaaagggtgattctggtgagggctcagaagagctgtatggaaagtctgaaactttttagagattacttcagtggttgtgatcagaatgttgataaatatagggatggcaaaggcaattctggtgaggtctcagctggaaatgagaaacaaggtattggaaactggaataaaggccatccttattagaaattaacaaagaatctggctgaatttgtgtccatgccttgggctttattggaaggcagaatttaagagcaatgaactaatatgtggtggaagaaatttctaaggaaaatactgaaagagctacatggcttcttttaactgcatatagtaagatgtgagaggtagaaatgatttaaagataaaacataattaaaaggaaggcagaacaaaaagatatggaaaatttgcagcctggccatttatgaagtgaaaaggtgtgtttaggagtgcaaaccaaggttgtatacccagagactgctgaaaagattagtatgaatagaaggaagacaggagctatcaagacagtgggagaatgaccctgaaggcattctggcgctctttgaggctgccccttccatcacagacagcattcactggctcatgctgcctcatgactctgcttcccacatgccagtagagtgcccttggctgccccagccattggttcctgctggctcaggtgtggctcagcctgccactgggcataagctgtaagcttgtggtggcagcatcaatgtggtgctaatttggcaggagtgcagaatgcaagagtcacgggggcatggcttccttcacttagatttcaaaggatgccttgggtagcctgggggcccagtcagatttgtccatgagcagaaccactgcagagagtccccactaggacagtgcctaatggagagaggccatccccaagaccccagaactgaagacctaccagtgtaaaactccaacctgtgacagatgctctatggcataagcccagcaaagccatgggggcaaggctgtctgagaaccagcccccaccccagtgtgtccaagtaggtcatagagttaaggaagggtcttctggagccttaagagttaatgttgtttggctgggtgcgctggctcacgcctgtaatcccagcactttggaggccgaggcaggtggatcacctgaggtcaggagttcaagaccagcctggccaacatggtgaaaccccatctctactaaaaatacaaaaattagctgggcatggtggcagatgctgtaatcccagctactcgggaggctgaggcaggagaatcgcttgaatctggagacagaggttgcagtgggccgagatcacgccattgcactccagcctgggtgacagagcgagactccgtctcaaaaaaaagagttaatgttgtttgcactgttgggttttggacctacttgggaccagttatcccctttttcttccctatttctttcagaataggaatgtctaggctatgcctgtcccactgttgtgttttgggagtaaatatcttgcttgatttcatagactaacagctggaggaaaatttgcctcaggataaatcatgccttgtctcacaatagctgatctagatgagattgaacttctgagtttgtgcttgaaagagttaagactttggggcaatcagaatggagtgtatgtattttgcatgtgagaagaacatgaatttgggaggccagagaagccacgctatagtttgaatgtgtcccccaatgctcacccccaagttttagggaaaaacttgatccccaatgcaatagtattaagaggtgggacctttaagaagtgattggtccatgaggactctgctttcatgaatggattaatgccattatcacaggagtgggttctttatcaaaagatgagttgggctccctcttgccctctctctctcttatcctctctgcccttctgccataagatgacgcagcaagaaggtccttatcagatgccagcctcttaatgttggaattcctacccttcagaactgcgagccaatttctgttcattgtaaattacccagtctgtggtattctttcctttttcttgagatggagttttgctcctgttgcccaggctggagtgcaatggtgcaatctcagctcactgcaacctccacctcccaggttcaagcaattctttctcagcctcccaagtagctgggattacaggcatgcgccaccatgcctggctaattttgtatttttagtagagatggggtttcgccatgttggccaggctggtctcaaactcctaacctcaagtgatccacccgcctcagcctcccaaagtgctgggattccaggcgtgagccatcacacccagccagtattcttttataggaacacaaaacagactaagaaaaaaggtaataatttttgtgttgaattcctatttttatatgtattgttcattccttttgtaaagtcaatgaaactaagataaatgagaatagaaaccatctaaaagatactgtgactgaatcatgtcattttttgtaacattgttgcattgttcaagtcaggaaacctaaaatctggatacatatttaaatgagaacaggccaggccccagggtattcctagtaaatcattttatgttttataattgttttaattgactattgagttcaatttactgatacttttttgcgaatgtttgcatatatcttaagtaaaattggcccacattttgctttttaggaggtatttatcctcatctaattttatattgggatatttgccttatataacgatctagtaaaattttgttatgggttatatattctttaaagctttttactgcctgtaaatctatagattctagtttttaaaaaacaagatcataactgtacatattttcccctttatggattagttcagggtttttttttggtatctggggtcaactttgatcatttaggtttctctagattgaaacatattgaaatatatgtatatagtaatactgaaacattgaaatatatgtatatagtaatatgtaacttaaatttttaaaaaaacctcattatgtagctatttcactttttccatacataaagctgtgagtcatgtttttccctcaataactgccaattctatattaatgttcttttcaaagagaatatccttagtctgttattttattaactattccattaatttatttgatcatataaactacttgctgttattcaccttagtttttaaaaatttctagcttaagttaatccttattttttcccataaattgcctgttatgtgacaggcactgtaggtgtgtgaacagaatggtgaacaacacaaatacttatttctcaatccagatgttctaaatgcattgctttaaattttctaccaagtagagctttggttggtgatttcccccaagttatctgtaggcaacatgtgatcattcatcactaaatagtctacaatttcagacttgattttctttctttttttttttttttgagatggagtctcactctattgccaggctggagtgcagtggtgtgatctcagctcactgcaacctccgcctcctgggttcaagcgattttcctgcctcagcctcccgagtagctgggactacaggcgtgccaccatgtccagctaatttttgtatttttagtagagacagagtttcaccatgttggccaggatggtcttgatctcctggcctcaaatgatccacccaccttggcctcccaaagtactgcgattacaggcatgagccaccacgcctggcccaaacttgattttctactttaaaaaactttattatggaaaatttaaaatatatgtaaagatagtaagaacggcacaatgaaccctgtgtacctaatgatccagattaaacatttaccaacattttgctaatcttgtttcatctatccctcccaccttttgtttttaagtatttaaaagtaaatcacaggcataacatttcagccttaaatacctcagtatgaatctctaacacttaaggactcatacacatatacccataatgccatagtcatgcctaacatatgaacaataaattatttcgtatcatttagtaaccaatccatgtttacatttgtacaatatgtagagacattttattccttcaaatcttgtattgactatgttttctttattttctgtattcctgatgctctggccacttggggccttgatcctggataggctgcccctcccagggcaagctaatgcatagatgataaactccactgcaagcatgcctttcatatacaaaccaaccaatccagagcccatactcccaactatctcctttaccaaactctcatacaccaattcaatattcccctgccctaactagacaattacgaatcccccctagatcccagagaccaacaaaattactcaaactattcaatcctaagcttaccagtgtgcctacccctgccttgtccattccttcccatgaaaacccccaataaaagctctgggccatgctgtgctctcaccctctgcctcctgatacacccaggtgcttctttacgtgaccctgcatgccatgccatgcctcccgtttgtgggatctgcgtataaacttcttccttcatgacaataatttccatgtctgcctgtctcaccatgattgattaaaacaaatcccaagcgcattttaacacaaggatcctaaaatgctccatacactgtatttgaaggatacgtttcttagtctcctttaaagtgtaggattccatttttgtcttttttttttttttttttgacatgtattggttaaaaaactaggccattacttctgcagaatttcccaaattgtgcatttggttgtttgcttctttgtgttgttaatttgttcttttattccccatgtttcctgtaaactggtaattaggtttggagactaacttgtacttctcagttttgggggagccaagaaaacttcacaggtgtccactgtgtgtatccatttcatcacatcaagttcatctggctgatctcatttagagatgttaatatagattagtgtcctgtcattctgctccatgcattataagcttcctatccatttttcacctaatggtcttcgcatccattgctatcaccacgaaaatccatgattttgtaaaattaaagagcgtagttttcaaattctatcattcatttgatctttgttttgttttgttttttgttttttgtttgagacagagtctcggtctgtcacccaggctggagtgcagtggcgcgatctcggctcactgcaagctccgcctcccgggttcaagccattctcctgcctcagcctcctgagtagctgggactacaggcgcctgccaccacgcccggcgaattttttgtatttttagtagagatggggtttcaccgtgttagccaggatggtcttgatctcctgacctcacgatccacctgcctcggcctcccaaagtgctgggattacaggcttgagccaccgcgcctggcctcctttgaccttttaaccagttggaattctctaatcaacaactttccttcaccaacttttggttgtcttgaaatatagtttgtaaaggataggcaaggtaaatattccattcttttcctttatttgttaataatgctctagtatgctccataactaatcaatgcatttggttcaggaaaaaaaaaagctcaaaggttggagtggtcatgataaaaggacacaggagccaatttgaggggattgcctcaaaatgctaaattgacaatttagcatttttaaaaaacaatgaagtagtttaaaaaattaatggggcttcataatacaggtgacttttaatttccaaagtttcatgttatcctttgtcaatttttaatattgactggggccagagaatactgattgtagtttttttttttttttgagacagggtcttgcagtcactcaagctggagtgcagtggtacaatcacagctcactgaagcctcaactcttgggttcaaatgatcctcccacctcagcctcgagtagctaggactacaggcatgcaccattatgcccagctaatttttaaagttttttggtagagacagggtctcaccatgttgcccaggctggtctcgaacttctggcctcaagcaatcgtccttacttggcctcccaaagtgctggatttacaggcatgggccacctcacctggtctagggtatctgttttttaatgaacaaactggaaaggaattccttactttcaatattttaacgagaataagatatctcaagttcaatgaagattaaatgttggtggaaggcatttctatactcattatgcccacagcctttagtatgaattatgtaaaaataaatatttagtatgataataaaagaaagtttagtggcttaaaacaacaaccattttattatatctcatgtttttgtgggtcagaaatttgggccaggggctcagctggtcaattcttccattctacatggcatcagttcaggttaccaagtcgctcactggcatttagctggtggctggtctggtggatccaaaatttcactcaaatgtctggtatcttggtggatgtcaagaagacagggttcagcaggtgcctctccctctctacgtagtttcagggcctcttcatgtggtctcttcagcaaagtagccagactttgtaacaagacagttctgtcatttcatgagatgaagtaaccctaccagtaaagtctgagtcaagaaaccagcacagcagtacgtctaccatattctactgggcgaagcagtcacagagggatgtagattcctgtatacaacagagggatgtagattccacctcttgattgaaagtgtgtcaaactgctgcactcttatatgaccatgtcataaattaaaaaattatagcacagagcagttaagcgtcttgtccagtatgacacaaagtgatgggatagggatgacggtaaatgtctttttcattcttataacaggattagtttttagaacaaatatgctgaagtttcaggtttgagtgatgatggactacaatacattgtcacactcttttaatggtataaaacctctaatgccaacgcagttgcatgtatggagcaaaatagattaattactacattcatagaatgttctataacacagaagttgaaaagactttcttagatttttacattatgaattttcagatgatgagtaaggtgtgaatgttgcctaaaggccttcttacattccttacattcatagggtttctcaccagaatgaattctcagatgttgaataagggatgaattaagtctaaaggccttcctacattccttacactcaaagggtttttcgccagtatgaatgctctgatgtagagtaagtttttggcgcaatctaaaggccttgccacattccttacatttataaggtttctcaccaatatgaatactctgatgctgtgtgagttgtgaaagtagtctgaaggccttcccgcattccttacagtcatagggcttaacaccaatatgaatactctgatgtgaaataagttgtgagtagcgactaaaggctttccagcattccttacattcgtaaggtttttcaccagtatgaattctgtgatggagaataagatgataaccacggctaaaggtctttccacattccttacattcatagggtttctcaccagtatgaattctctgatggagtgttagttgttgtcgcactctaaaggccttcccgcattccttacattcatagggtttctcaccagtatgaagtttgtgatgtactctaagaccagagccacacaaaaaggccttcccacattctttgcattcatagagcctgtcagcactattaagcttctgatgccgagtcaggtgtgcgtactgtctaaaggcttttccacactctttacacacatagggtttctcaccagtatgaatcctctgatgcagagtaagttgtcctcgtaccctaaaagccttcccacattctttacattcatagggcttctcaccaatatgcattttctgatgtactctaagatctgcaccacatatgaaagcttccccacattccttacattcatagagtttttcaccagaatgaagtctctgatgtcgagtaaggtgtgcagtctgtctgaaggccatcccacattccttacattcatacggtttttcaccagtatgaattctgtgatgaaaagtaagctgttggcgcactctgaacgccttcccacattccttacattcatagggtttatcaacaaaatgaagtctctgatgtggagtaacagatgtgcgtttctggtaagaggacaccttttcagatggcattttcacactactgaagtatccttcttgaggtctctcctgtccttcaatttttcctgtggattcccaatcattttttaaaatgagacccttaaggccatggttttcaattctttccattatcttccactgggataaatttatttcataaatgtcattttctaaagataacttcttggtctcatacttggtctccaaatctaaaataaaacaagaaagcaaacacatgctgttttcttttactaaaagaagcaacatttctaatgtagaaataaaagacaacaaaagtaatccttaaccaaaactctaaaatattgttatacaatttggaaagaaaaaaaaagccaaagggaacatcaggaaaaatgagagttcatacaaaatagcaagattggtgatgaagtaaacattttaagtcagtggttctcatattgaggtgtggatcagaatcaccacatagcttgttactaacactgaggtttagacaccacccaaaccacctggatcagactctgcagtcctggaaggatatttaatattctctacatgataattctgatgaagatgagaggtcgagaatctatacttaaatttttttcatctttcttcattctcagaatccagtcaagctcactgtggttaagaaggcctctgcttacctacatcatatgatctcaaaccagtgtcccctttactgctccctggagaggcctccttgcagacctcacatgtcctaacttacttccatctcttaggactcttcacagtctgttctatctcccacaaatctcctgattgggctctttgcatggctggctcctttcatcttgagatcttagattaaaagtcatttcctttaaggttgaccctattgatagtacctaaatccatgttgctattctctattccttgcctttataatagctctcaatttaaaaattatatatttattaacttctccaattgttatactgcctattcttacctataaacctcctcaaggacagaaacaatccctagttaacgctacattaagtaataaatgctaagcatataataggttttactcatttaattcccatagctacatacttgttctaaatgtatctctctgcctctagtctctcatgccttactacagtgattaaatattctctttattcatccagggcagcccagctaaatacaagaatggaaataggtggctgtatattcctatgcatctgccactgcttatgcctttacctatgcagtgcactgcccatttgccccttcacatagctatgggtaactttttctttgtctctacaccatagcaaaggtattgaggagttctacctactcaatcttcccttcaacttattctattactcattcatttgacaaatgttcaactggttttgttctttcctcccattgctcaggttttctcctttccattccctcatagtcaaggccattcctgtttttttaggaaatgtgtatcagtgatttttcggacaggaaaacacgtctatatcttactgaagttcttatgaaattcatggcacaaaaagacaggatatgcctgtaactcagaaatgtggaaaaaagtaatgtgcatgttcaactgttgcagtcatctgaatgtgaaggacttgctaacagaagtcacgttacatgtaggccagaggatggcaagccagcaacaggaacagccagaggaaaatctacaagctgaatgagttgtgtatgagagagaaacaggatgaggttttcaattatgataaggtggtctctattaaaaagctgaaatctagacacaaaactaggagttagcaaaaaaaaaaggttgaaattatatagacattttctactaaaactggaaattaataataaaattaaaagaaacacaagtaaaatctacctgaaaattcaaaagtctatattaaataactcttaggtcaataggaaaataagatctgaaacaatgtttttgatttttgcttgtttgtttgttttttgagacagagtctcactctgtcacccaggctggagtgcagtggtgtgacctcagctcactgcagcctctgcctcctgggttcaagcgattctcctgcctcagccacctgagtagctgggattataggcatgtgccaccacgcctggctattttttttttttttttgtatttttagtagagacagggtttcaccatgttggccaggctagtctcaaactcctgacctcaagtgatcctcccacctctgcctttcaaagtgctaggattacaggcatgagccaggccacctggctgtatttttgtttttttgaaaataatgggaggccaggtgtggtggctcacacctgtaatcccagcacttgaggaggccaaggcaggaagatctcttcagcccaggagttcaagaccagtcagggcaacatggcaagacctcatctctaaaaataataaattggctgggcgcagtggctcacgcacataatcccagcactttgggaggccgagatgggtggatcacgaggtcaggagatcgagaccatcctgactaacacggtgaaaccccgtctctactaaaaatagacacacacacaaaaatgagctgggcggggtgtcaggcacctgtagtcccagctactcgggaggctgaggcaggagaatggcgtgaacctgggaggcggagcttgcagtgagccgagatcgcgccactgcactccagcctgggtgaaagagcgagactccatctcaaaaaaaaatacatacataaataaagtaattaaaaaattagctgggcatggtagtgtgtgctatagtcccagctacttgggagactaaggtaggagaagtgcttgagcccaggaggtcaaggctgcagtgagctctgtctatgccactgcactctgggttgggtgacagagcaagactctgtttctttaaaaaaaaaaaaaaaattaagcctacattttgaaaacctgcatataagtatctataaaacataaccatagtgcttataagaaaatttacaaactaaaatacagcaataaaagtgaaaaacatcgttaaaagtctcattcaaaaaaagaaaataaaattaagctgaagtaaagcagaagaaaaatattaaccgatataaaagcagaattagttagaatacagaaatagaagtaataaagcataaaccaattttttttttttttttttgagatggaattttgctcttgttgcccaggctggagtgcagtggcgcaatcttggatcgctgcaacctctgcctcccgggttcaagcaatcctcctgcctcagcctcctgagtagctgggattacaggcacacaccaccacgcccagctaattttttgtatttttactagagacgggtttcatcatgttggccaggctggtctcaaactgctgacctcaggtgacccacccgcctcggcctcccaaagtgcagggattacaggcgtgagccaccgcgcctggcctcataaaccaattttttaatcaacaaaatgtaagccatggttaagataatgaaaacagcaagaaagcacagacatagaaataagaaagaacaaatgaaaatgatcatgaatacagaggacagatgactatgctaataaatttgaaaacacagctaaaatggataatttgttgtttttttgttttttgagacagagtctcactctgtcacccaggctagagtgcagtagtataatctcggctcactgcaacctgcacctccacccgctggccccccgccacgccccaccaccttcaagcgattctcctgcctcggcctcccaagtagctgggattacaagcacacgccaccacacccggctaaattttgtacttttagtagagacgggatttc[131 bp omitted]tttatcaaaactgatcatggaagagatagatgttaataaaatgtttatatagatcaattcccatagagcaaatagagaatgtgatcagacttaccatcccttttcccaagaataaagctttacaaaacttatttaagctttaaagacaggctatcaaaattctttttcaactaagaagatcaggacttccaaactgttttcataaagtgatactgatataaagatcgctcacaaaaagaaaactacacaccaatattctgaacactgaggaaaaaattctaaatatctaataaaacagcacattgaaagacccaaggggtgtttattacaagaatgttttaggctgggcgcagtggctcacacctgtaatcccaacactttgggaggccaaggtaggtggatcacgaggtcaggagttcaagacctgcctggccaatattgtgaaaccctgtctctattaaaaatacaaaagttagcggggtgtggtggcacatgcttgtagtcccagctacttgggaggctgaggtagaagaatcgcttgaacccaggaggcagaggttgcaatgagccaagatcacgccactgcactccagcctgggcaacaagagcaaaactccatctcaaaaaaaaaaaaaaatgtttcaatggttcaatatggggaaatctattaagacaattcaatataccaacagagtgaaggagaaaaaaaaaatcacacaatcaattccatagatgctgaaaaggtaactaaaaaaagaccaaaactgttcctgaatttgttttcccaagaaacagcgtcaccctctgtcaccacagctggagtgcagtggtgcaatcacagctcactgccgcctctaactcgtgggctcaagcaatcctcctgcttcatgttcctgattttttttaaaaaagctcagtgaaactgtaatgatacttccctaaatgataaagtatatattatcttaccaaaaaggcagcttgcctaacattaccactactattaatgatgtagtattagagttattagtcaacataattaaaaaatcagaaaaaaaaatcagaggtagaagaattagaggtaaaactctatttccaaaggatatgcctgtctaattggaaaactcaaaggtttaaatattataaatggcaacaaaatttagaaaggtagcaggatataaaataaaaatacaaacaacaatatcctttgaatatacatttaacaataaaatatgaggggaaagatctcactcataatacttacaaaaatttaaaatatatggataacctttatgaggaaaacttcgaaacactcatgaagtatttagcattgggtatactgaagaaatcatataccaaatcacaaggaagagattcctgcacagaagctaagggtgccccaccaagggtggtcatactaagaagctgctgagcaagaagcaggtgtggagacagtggcaatacacagggtaactgctgtgttcaaagtggtcagataaacttaaccctcaggttacctctccaaggccagacagcaactactactgtttacctccagaggaggcaacagacaagaggttagggtatcagagatgggtcagtggctggtcatgtcctggggatacagccacagtcgcaggcccaggtgacaaagcaccccacctcacaagaggcaactatgtttgttccaaacaaatttaggtgtgtttcacttttttcctgaaagtatctaatttaatttaataaatgttaaataaattcatgagtgtaaactcatgaataacaaggagaaaacaactgattctatgaaaacaaaattgaacattttggaaaactggtgataaatacagattgctaaaaatctcagctgtcgaaaattaagtgtaggaaatacaatagtaaaaaatgaaagaaaacataacaatcaagacgtattctgcactcatactgcaagtttggttcctattctactttaaaaataaataaaactggaaataatagacttcatattatgtgtgtgatttagaggaaaaatgaaatacaatgagacaatggaaaggaagacttggacactatcaaaaatactggcaaacagacatacatttgaatgttctaagttaaaataatacttttatggtatgtacataaaatatacgacccatttttttatgactaacagacctattaccagtcctaaatctgttggatcaaaggatttctagtccattaaacacttctgatgagaatgtagaaaagtcctttttttgatcaggtaaaaatatataaatacaaaaaatcataaatgtgattcctctttgcagagaaccacctttaattaaacagaaaatgtcatataaatcacttagacttactctatttgggcactgtatcaaccatcttactttgttgatacaagaagttctgggatatagaagatttggttccagggaagtcctatttgcatttcaacacagggataatgtacaaagatctgaaaatagtaaaacccgacatctaaggaactgtacttcggagaatcaattttaatcatatcctgaataagcccatactgaatgctaataatattccattgatgctctcacattctattgatcttctttttcactgagaaaacagcaacagaagaatatgctatcttctctccaccatcctgagcaacctacctgcacacataactacactgtttttcccttttattcccccttactcactggatcctttcttactccagtctcaaggacaattatgcctttctctactgcactgatttcctccaccgatagaatcattcctatgagcacacaaacatgccctaatgtcataaaatacactgctttttaacccatatccccagtgtaactgacaaccctatttcccagcttcccttcatacataattcctccagagttgtcttatactcattcttgttactgcctcacaaacccttctctcatcaagtcactccacttgggctttcatcctgactccattgaaaatctttcttgacaagcttaccaggattctccatcttgctggaacctggggtcaattctcagtcctcattctctactccgtccatggtgaaacatttcctttatttttattttatctcaatggctgccccttctttttttttttttttaatttttttagtggctgctccttctttatctcttttgttgtccctctttccctctttcaaaggtctacagggtggagtgacccatgagtcagttctcgggcctgcctgccttccctagttggtcacatccagatccatgaatgtaaattccaatcatacagacagccaaacataaaccaggctgtaatcgctccaagttccaggtgtacgtattcaactgcctacgcaacatctcaaactggacagataataatcatcacaaacttaaaatatcttaaactgaaactcttagtgccaactttccaacttgctcttcctattttcctcacttcagtaaattctgcttctattcacccagttgtttaagccaacactcatttcttctccttttatatcactccttcccacttagttcacttataatcctatcagcatgttcttttgacagcgccttcatacacatcatgagcctaacagcttcttactacttcctaacaatgccattcttatccaaaccaccaccctgtctaactcaacaactgaaactgcctcagtatcggtgcttcctgcttttgcactcaaccggagaaataattttagaatacaagcagcccgtggctttcaatttctcttagtggttacattaccgggtccttgcctaactctgatctcagcttcttactttccctttccctggtctgaccataatggccgtctttgttattcctcagactagcaaggctaatgccgcactcagaccttttctatcagctcataatgctcttttcccagaaaatgacatgtcttgagcccttacttcatgtctcttctcaaatatcacctcaagaaagtcatctgtccacttttctgaaggcatgttatttatactttaatcaaactttcttaaaggaagaatagaaaagaaagaaaaaaaatacatggtcttgtttaagatgtctaactctgagccaacagttactattttggctaaatgcttcctgactaaatggatattatcttattcacttggaacctctgcaatacattttgagtgttaataattgcaaatgtc[133 bp omitted]acacggtaaaaccccatctctactaaaaatacaaaaaaattagccaggcatggtggcgggcgcctgtagtcccagctacttgggagcctgaggcaagagaacggcgtgaacccaggaagcggagcttgaagtgagctgagatcacgccactgcactccagcctggacagaagagcgagactccatctcaaaaaaaaaaaaaaaaaaagattagggataagagggaaaaagcatgtttttctttcttttggtagaaggttaagtcagaagatagaacattacaaacagtgtaggcactgaaatggtcctatggttataaaataagaactagtaccctaaaataagtgtccttagccagacctgaatatacagagaacaaaatacaaaattacaacatatgtctctgaataaaaacatttttaaagaccttttgtggccgggtgcggtggctcacgcctgtaattccagtactctgggaggccgagatgggcggatcatgaggtcaggagttcaagaccagcctcagcagcatgg[144 bp omitted]gaaaccccaactctaccaaaaaaaaatacaaaaaaattagccgggcgtggtggcgggcgcctgtagttccagcttctcgggaggctgaggcaggagaatggcatgaacctgggaggcggagcttgcagtgagcaagatcacgccactgcactccaggctaggtgacagagcaagactccgtctcaaaacaaaaaacaataacaacaacaaaaaaaattatccaggcatggtggcaggcacctgtaatcccagctgctcaggagaccgagtcaggagaatcacttgaacctgggaggcagaggttgcagtgagctgaaatcacaccactgcactccagcctggggaacagagtaagactccatctcaaaaaaaaaaaaaaaaaaaggccaggcgcggtggctcacacctgtaatcccagcaccttgggatccagcgggtggatcacaaggtcaggagttcaagaccagcctggccaagatggtgaaaccccatctctacaaaaaatacaaaaaattagccaggcatagtggcacacgcccgtaatcccagctactccagaggctgaggcagagaactgcttaaacctggaggggcagaggttgcagtgagccaagatcacgccactgcactccagcctgggcgacagagcgagactccgtcgcaagaaaaaaaaaaaaaaaaaccttttgaaacaagagctgcaaagagagatgaaaacagcacagacaaggtaaacaaaagaccatgagatcattctctctagagtctattatatccatgtttcttcttaatgtgaagatagatgaatacatagatagaaaaatcaaataagaatgatattctgtgaactaggagctatcttctagaataattcatatgaaactttagttgctgataaaacatatatgattatactatcaagcatatcatttttgtagtcttttatttccctttaataatttatgagaaaagttgggggaaaaaaggcttctctgacaactaaaagagtcttcccagcacacatctccatccccttactctgcttacttttcttcatagcactctcattacctgacattgtatttcctatttatttatagttattatgtttctcttattacaaggtaaatttcgtggggatggaaacttgattggttgtttaccactatattgatagtgtctgtgacagtgcccagctccaaggccacctgtctatttattaaagaccgaagtaaaagtcctaaaccccgacagactgaaggaccctcttttggctaaagaccccatgttcctagtcatggcacatggcaggacagaaggctggtcatgacccatttgcttccaatccctttcacctttctgatcattagattttctcaaaagtcagctagagaaaataaaaggctgaaagacccttttgcttacttcatcagaacactcccccaccactccacactcctgtttttatggttccaacatgacagctattccagtccacagcttcttcttgataaacgacttccagccttggactggttttgactggtctcccaaggatacacagatcatggacttgtgtcctacatttacccttttaatgcataggtcctagttataatgcatttaaatgttaaatctctaccctaaagtggccataggacttatgttaacctaatatgcatgtgcacagtctctttcctgagtattcatagctcctcctgtagcctgttgaatatgtatacttggctaacattcagcatacatttctgtcttaccctctccctccctcgaaatgcccgtctctgggcagaagcctaggctacacttcccagtctgtcagaataaccgccttgcaggctgcaatcctttatgaaaaataaagctctcctttccaaatgtatgaactttgtcattcttcagctgacactataaatgcaaaagaggggctgggcacagtggctcacatctgtaatctcagcactttgggaggctgaggcgggcagatcacctgaggtcaggaattcaagaccagcctggccaacatggtgaaaccccgtctctactaaaaatacaaaaattagccgggtgtggtggcacacgcccgtaaacccagctactcagaaggctgaggcaggagaattgcctgaactcaggaggcagaggttgcagtgagccgagattgtgccattgcattccagcctgggcaacaagagcgaaactgcatctcagaaaaaaaaaaaaaaaaaaaaatgcaaaggaggaaagcaactgaatcaaaatatacaatggttgtcaacagtgagccaaagagagcaccaccttacccctcagctccattaaggaggaggaaaactagagagaacaataataaaaaagaagagtggtaaatgggacaaataagtgcttcttttagtatcccccagctaagaccttaatttgctccccatgtcacagacctttcctccttgggccacagacctttcctccttgggccacagacctttcctccttgggccacagacctttcaagagggctttctaaacaacataaggatgtgtctcttccccagtgatctggggttccctgtgttgatggcttcttcctgcccaactagccctcacctggatattgtcttcttcctttcctcacaactttccaaggctcttttccttgctccaatgaggaaatcacatctggtttagaaatgaagcatcctgcttagaagaaaaggaatataaggtacatgaaaataaaaaataaatcaaaattactttgattcagtcttggttaaagtatatgtcaaaacagtaattaataaggcaaaacaaataagtgaaagatgttttaaaaacatttacgttaaggttacacaataaatagagactagagagggaatgaaaaaatctttttaaaatctatattcatataagtgtttctttttcagaggcaatagtggttgagatgacagactgctgggtgcaaatcctgcctgaaccacatcctagttgtatgaccttgggcaagttacttccatgctaccttttccttccctataaaatagggataatcatagtacttatcttatatgattattgttaagattatatttatatatgtctgtatctaaacattgcctagagtatataccaaacactatttatatttcattagctattggttattgttattttgctgagaggaaaaataagctttctgggacatgtattatttcttggatattcaaacaatgttaaattaaatgtaaagttcttggattttaacagctttgctgcaatataatttatataacataaaacctacctaagtgtacaattcaatgatttttagtaaatttacagagttgtgcaaacgtcaccataacccaaacttagaatatttccgtcatcccccaaatatccctattggtcactggcagtcaatcctcattcctactcccagccccagacaaccattgatcttctttttgtctctatagatttgccttttctgggcatttcatataaatagaatcatataatatgtaatcttttgcatctggcttcttccacttagcatagtgttttttatattcttgcatgctataacatgtatcagtagtttgttccttcaatgaatattctattgtatgactatgccacattttatttatccatttatttagataatgtgaataatgctgctgtgaatacttatacatctttgtatagacacatttttatttctcttgagtaaacatttaggagaagaattacagggtcgtatctatagtatcgtacattcccactgcaatgtatgagggttctagtttttccaaatactcactaataattattttgtcttttgactaataattgtatatatttataggctacaatgtgatgttttgatacatgtcattgtggaattagcaaatcagggtaattagcatatccatcacctcaaatatttatcatttcttttctttgtagtgagaacattaaaaatactctcttgtagctattttggaatatacaatatacaatacattattattaactatactcatcttgctgtgcaataaaacacatgaatacaaatcttagatttttaattttcttttttttttttttttttttgagacggagtctcgctctgtcgcccaggctggagtgcagtggcgggatctcagctcactgcaagctccgcctcccgggttcacgccattctcctgcctcagcctcccaagtagctgggactacaggcgcccgccactacgcccggctaattttttgtatttttagtagagacggggtttcaccg[140 bp omitted]gattgtttattaatgaagggaatgagttctcttgaattgtaaatacatgctgttgatccattttaccactacataaatcatatgtattattttgatagagctaattcaataaacaggatctagctatttcccttacaaaatataccaacaagcaacaaaacatctaaagcagttctgaattcaaacacaaagtgaaacttgttttctttgacgctggtgaggctacaaatcacaaagatctcaaacccagccccttcattattaaggcccaagggctacttaaggatggggaaggtcaatgtgcttaatgaaggtgctcacttccaatgaaataaagctcaaagtgttccctttagaaagtggagcaaaaatttagatagcttcctaaaagatactcttgaaatttccacaggaaaaagctgatttacagagaacacagtctaaattcctagaagcagataaccttacccagtgagaccaagttgctgtagttctccaacatgacatctctgtacaagtccttttgttccaagtccaggtattcccactcttctggagagaagtctatggatacatcactgaacatcactgatcgctgaaatgacaaaccacacattataaatgaaatggaagaaaatgtattttaaggtagaaggagaaaagaaggaagagatattgcaggaagtggatcatatggcaagaaaacaggcttgggctggaagcctgcaacacagcgagtcaggaaatgagtgtgcctgaagcaaagtgcctgggttcccgaaggattctgttgctacagacacagactcttatactctggcaaatcttaataatctagatactcctgggaaagaaaaaaaaatcagttttccaattaaatgaaatactgtatataagcctttgcctactatgtctccctcatcaattcccaaggaaggtgagttcttccgcccctttcttcttaaagaacagatttttttttaaagtctccctccctacaatatctttatcttagaaaaggatctaaatgcaattagagaatatcttctaagtttatcctagaagcagatcatatcataagcatttttctaattatgactgttaaaaattggttgtataggccaggcgcagtggctcacacctgtaatcccatcactttgagaggccgaggtgggaggatcacctgaggtcgggagttcgagaccagcctgaccaacaggagaacccttgtttctactaaaaatacaaaattagttgggcctggtggcacatgcctgtaatcctagctactcaggaggctaaggcaggagaatcgcttgaatccaggagcagaggttgtggtgagccaagatcacaccattgcactccagcctagccaacaagaacaaaactccgtctcaaaaaaaaacaaacaaaaattggttatataatagtctatacaatgcatatatgagatttaatcattcttttatacttagatattttggttggacaaaaccttaagatcctcctcaattctgggagtcaacgtgactacttatgtacctggattaccttctcacatgctatcactttccatccctcactgtatgccttcctggttcctgagttaaaggatattaatatagcataatccagaatcacaaagatgtcattctagaccagcacatcctgttcaaccaaaaatggaatcttgttcctgagtgtaactcaggaattccaaaagatctcagatctctctataagacctagccacacccctactcagtcctaaaagcctcacaaaacatgagatcttatgatatactgaggctgaggccaactaacagcaactcttacctttttgttttataactttttttttttaagagacagggtctccctgtcacccaggctggagtacagtggcacatccatagcttcattggagcctcaaactcctgggctcaaacaatcctccatgtcaacctcctgaacaggagggattacaggtgcaagccaccatgcccagccacgacccttatcttacgtacttggaaaactcaaagttcagttttcctatgagtggctaaatgggcccatggtcaaatatttaagagatttcatttttcctccattgcagcttttagcagaagactgagcacatataggagatgctgaataatttgttcaacaaagataagaacaatgactagaataaagagtgttcataggacaagcattgtggttcacccgccactggatttggaagaactggaagaaggttcttggatggagctctgatagtaaggaagtttcagaataaaaaaatggtcacagaaccttaacatgatagtattcctaggaggagaaaaaaacttacaagggccatggtatagaaattcaagaactggtcagtcctccttggggtttacttgccaggagaagcaccgagtccacagaggctgatctagggagaggaaaacaaggccatgagatcagatggacctcagaaatccccaaatgatttgagttactgtgacctttcccctctcttctgatctctccaccacagctcctccaacacacacgcgcgcacacacacataggcagagagagagagagaaatttgagggagtctggacgagtctaatcccttgctaattccagggctgataaggggctgtatcatctaaaccacaatcttccttcttcaaagtttcataggcctgtttagattcaccagacacaaagagagaaattcataaagaccaagcctggcagccattaccaccacaaaactgcacactggcagccctgcttgcagccagaacaactttcaaaatcctctgggctcatcactctctctttccagtcagaatcagaatcatccacattgttttctggaatgaattcatttgccattctctttcttacaacctaggctgaacaggcatggattcatgctcttggtcatttgacaataacaaatgtctatttatcaagaattccagtatgttgggtgttatatatgtatgtgtgtgtgtgtgtgtatatgtgtgtgtatatatatatattttgttgttgttgttgctgttgtttgttcttgtttttgtttttttgagatggagtcttgctcttattgcccaggttggagtgcggtggcacgatctcagctcactgcaacccccgccacccgggttcaagcaattcttctgcctcagcctcccaagtagctgggactacaggcacgcaccaccacgcctggctaatttttgtatttttagtagagaccaggtttcaccatattcaccaggctggtctcgaactcctgacttcatgatccgcccgcctcggcatcccaaagtgctgagattacagatgtgagccaccgcacccacccggcctgttttatatatattaactatatcctcaggattgctctttagcacaataattattctatccatgcaatggatcagaaattcacatgaagagaaataaaaccacttgggctgggcgagatggctcacgcctataatcccagcactatgggaggccaaggcaggtggatcacctgaggtcaggagttcgagaccagcctgaccaacatggtaaaaccctgtctctactaaaaatacaaaaattagctgggtgtggtggcagacgcctataatcccagttactggggaggctgagggaggagaatcgcttggacctaggggggcggaggttgcagtgagccgagattgcgccattgcaccccagcctgggagacagagcaagactccatctaaaaaaaaaaaggaaataaaatcatttgtagaaatgcagtttatgagtagcaaagctgcatttggaatcatttatctaaccatagagtcggctttccttcaactctagctcttgtttctgaaacccagaatttctattccagtgagcgaaaactggcatgcatgattcactaaaaaaaaataaaataaaaataacacatcagctcaccaacaggtatctgagtactgatacccatatttgcaagcatgagaggaaatgaacattctaaccagtatactgcagactgcatagatttcaaagtatgtacaagcagcatttaaaccacgcatactctttgattcagaaattctactttggggattaaaaaaaattgtacatatgatcaaaggtatgtgtaacagtatgttgaccttgttcataatggaaaaaagctgggaagaacctaaatgtccttcaatagaaaacagattaaataatcctggctaacatggtgaaaccccgtctctactaaaaatacaaaaaattagccgggcatggtggcaggcacctgtaagcccagctacccgggaggctgaggcaggagaatggcgtgaaaccaggaggcggagcttgcagtgaggcgggatcatgccactgcactccagcctgggcaacagagcaagaccccgtctcaaaaaaaaaaaaaaaagaaaacagattaaataaatcataaagcatccatagagtaaaacaaactgttgccatttaaaaaatgataatgcagctctttaactggaaatatggaaatatgttcagtacagtttgttgagtgaggagtgcagtaacaaacagttgtgagtagtatgatcctgttaaggtacagcaaaaacagacgtgagagaaacagagagagagagagagagagtgtgcgtgtgtattaatctctaagtgctaagttttagaaaatacacaaggacatataaaatattcaagatatataatctcttagaaaaataaaatgaacattattaggacatctgtaaagtatacatgcaaatcagcacaaagaaacactgacaggcatcaatagatattgatcttgatttccttttcgcttacatttatttcataattctacatgaccatatatacttgaaacatatattttaactttgcatagtggaaagcgttctttaaataggttaaagagatagtttttaaagtagtcatcccttgaacttggagaaaaaaactcaatatcctacaagcagcttctatgtttttactggttttgttgatttcagctcccaaaatctgaactgactctatgatttctaagtgtgttcatgtatgtcagagttctgcctatataaacatggctaaacatcttcaattaatgccttgtttcactgctgctacttctcatgacttcttgaccaagcttttgttttgtttctgaaagagttgttttagccatgaggcccacctaggagctgctgaatcttcttgtgctgttcatttgcatcaacatcatgaaaataaaaactataaggcacatgcttattacataaaatccattaccccacaggaaccccatgagtttggtattatttggtcgtgacctgacaatgcttgctacaatcagctgtctgcttcccatgacctctcaagccatgccacctgaattcttcaatgactttacctcacctatctcagtgttattcttgcataggcttatctaccttgaaagacaacaaacaatgtaaggatatcaaccatgtcattttggtcactgtatttcccccaaggactggcacaggatctggcatattgtgagtactttataaatgtctcataattcaacccagaaattccacttttaggaatttatcgttaggaaatatttgtaaaagtatacaaagatgtattgcaagagagttcatcaaagaataatttattggccaggcatagtggctcatgcctgtaaccaacactttgggaggccgaggtgggcagatcacttgaggtcagcagtttgagactagcctcgccaacatgacgaaactccatctctaccaataatacaaaaataagctgggcgtggtggcagacacctgtaatcccagctacttgggaggctgaggcaggagaatcacttgaatctgggaggcggaggttgcagtgagctgagattgcaccactgcacttcagcgtgggcaacagagtgagattctgtctcaaaaaaaaaagaataatttacgacaacctgaaatcaaatacctaacagtaggcaacaagttgaataaatgatgttctactatattatagcacattatgcaattattaatgatggcattggcccacattaattaaagaaggaagatattcatgataaattactagctatgggagtcagactaaaagaatatgtacaatgttgggaggtggcagactctcagttattaaaaatacaggctttgttatcaagattcaggatatgaacagagctctgagaattattaactgtgagaatttggacgcattaattttcagtgtctcagtttcctcagatataaactaaggaataaacagtacctaccttatagggttgttgtgaaggttaagaacataatacataaagcacttaaaatggcttactgtaagcactaaattcagtgaaaaacatcacatacccctcattccactattttaaaaattatcttcaataattttttttttttttttttgagatgcagtctcgctctgttacccaggctggagtgcagtggcaagatctcggctcactgcaagttccacctcccgggttcaggccaatcgtctgcctcagcctcccgagtagctgggactacaggtgcccgccaccacgcccggctaattttttgtatttttagtagagacggggtttcaccatgttagccaacatagtctcgatctcctgacctcgtgatccgcccgccttggcctcccaaagtgctgggattacaggcgttagccaccacactggcttcaataattttcaatttaaaaatttggtatttgctgataaattatctttaacaatttcaatagcagtccctttctctaaagggatttttgagatttttgagatttttcagcattgctcttaaaacattgataaatgttagaactaggcttgaaaatgtaattctacttttttttttttttttttgagacacaatcttgctctgtcgccaggctggaatgcagtggcatgatctcagctcactgcaatctctgcctcccgggttcaagtgattcccctgcctcagcctcccaagtaactgggactgcaggagcatgccaccacacccggctgattttttgtattttagtacagacagggtttcaccatgttggccaggatggtctcgatctcctgacctcgtgatctgcctgcctcggcctcccaaagtcttgggattatagagatgagccaccgcacctggcctatgtaattcttcttaataatgttatcaaaaaaggattcacagaaatcaaaaagtagagcaaggcccctgttactttccatccctagtagctccaaagggacaccattccatatcataaaaccagctcaagaattttgctttgataaggtatcatattaaatactttttttttttttttgagacagtttcgctcctgttgcccgggctggaatgcaatggcaagatctcggctcactgcaacctccaccttccgggttcaagtggtcctcatgcctcagcctcccaagcagctgggattacaggcatgcaccaccacgcctggctaattttgtatttttagtagagacagggtttcaccatgttagtcaggctggtctggaactcctgacctcaggtgatccgcccaccttggcctcccaaagtgctggaattacaggcgtgagccaccaggcccaacctctttttcctttttcaaacaaagtgttgcagagtctttgtctccttaaatgatcaattgttgtgattctattttggaaaacaaacacatgtgcacaagtgcacagaaaaaaatggaaaagcaaacattagaatagtaatatttattgtggatggtgagactacgggcaacttaaattttattcttatagagtgaagatgactgggtggtaggggatggagaaaatctgttctgaatagtactaaatatagttggcagcttaaaccaggactttcttttttttttggagactgagtctcactctgtcacccaggctggagtgtaatggcaggatctcggctcactgcaacctctgcctcatgggttcaagcaattcttctgcctcagcctcccaaatagctgggattacaggcaggcgccactgtgcccagctaatttttctatttttagtagagacaggttttaccatattggccaggttggtctcaaacttctgacctcaggtgatctgcccacctcagcctcccaagtgttgagattacaggcgtgagccactgcgcccagccaattaaactattttcatacacatagaattaaaaacagagttgtgaagaaggaatatcttttagttgttaagaaaattgtgattctataagcctgtgacatgagtgggttttgggaaaataaacaacagtgtggcacaaataagtaacacccatcagttctttaactgttcttcatcaaaacgatgggctattttcactctcaagattcttctatgaatgaacacaatcaagcgacattcctaaattcagtaaaagtataccaaagcagacagaacagtgtggtaaacaacagtttatctttttttctccactaagaaactagttttatattatgtataatccttgcaaaatgttttataaatctctagcttattaagagcgattcatacatgattaaaggttttgtgagtcatcttgttcaaaactattgcttagacaacatcgatcacaagctttttttccttctcataattaacagtatttattaatggcaaaaagctgcatcacatggagtgtggcttatttaatcatttcctactattagacactaattttgtgtctaacattgaaaaacattctcaaaggttacagactttgattctaggccagtagatctgaatcttaatggatcatgtttgataatctcattaaattacatattttctccccataaaagtggcatattaacagatatctataacaattttacgtacaatttcaaagagtatctggtcccctgaaagcctcaaatgaattcaaattacttctggttaagaattcctgttctatggccgggcacggtggctcatgcctgtaatcccagcactttgggaggccaaggcgggcagatcacctgaggtcgggagttcaagaccagcctgaccaacatggagaaaccccgtctctactaaaaatacaagattaggcaggcgtggtggtatatgcctgtaatcccagctactagggtggctgaggcaggagaatcgcttgaacctgggaggcggaggttgcggtgagctgggatcacaccattgcactccagcctgggaaataagagcgaaactccgtctcaaaaaaaaaaaaaaaaaaaagaattcctgttctaggctgggggcggtggctcatgcctgtcattccagcactttgggaggccgaggcaggcagatcacttgaggccaggagtttgagaccagcctggccaacatggtaaaacccggtctgtactaaaaatacaaaaattagctgggtgtggtggtgcaggcctgtaatcccagctacttgggaggctgaggtataagaatcgcttgaaccacggaaagggaggttgcagtgagctgagattgtgccactgcactccaacctgggtgacagagcaagaccctgtctcaaaaaaaaaaaaaaaaaaaaaaaaaaagaattcctgttttagactatttaagcatctgatctggctcatttattttttactaggaaatactcaccacaattggcttagtattttcattttccccccatctatagaaggctgatgtagaattgctccaaatcactacttaagaatacataactaaggtttattaagtactaacgaggtctcaggaactgttctaagaactttacacatagtaattaaaagaaggcccacagaagtaatgaaaaacatctaccaaatgggtatgtgcatacaggctctcgggaggggacctaggtatcagctcaatggacaggacatttatggagaatgaaacaaatattctcatgtcctaagaaataagaatgcatttcacagaagaaagcagaaacacccactcgcctcgaccttgacttaaacaggcaacagcaattcattcctcctcccgctcggaccccttttcttaaagaattgggcaggactggctaataagggaaccaggcttttcttgcagcccagcctcgcatagggcacaatgcccccaccgcccacccacacataaccagagtaacataagagagatggtgttgttaactcttcccagtatcaaagaaaggccagggtcatggatgcccggggctagaactggagttcacaatagcttcctggaagcaatgctgtggttctgaaacctgcagctggactcttcagagttgtgagtgcacgtgcgtgggtccgggtccgcgaggaggtggtgtgggagtcccttccaggagcaagcctgggcgggagcgggggctcgttcagttctaatattcctatcccaaggtcgggtctgagccttgtttcgctgttgcccaggctggagagtagtggtgctatcatagctcgctgcagcctcaatctcctcctaggctcaagccatcctcccgcctcagcctctcgagtggctgggaccacaggagcacgccatcacacccggctcattttttaaatttctggtacagatgggagtttcgctttgctgcccaggctggtctcgaactcctggcttccagcgatcctcccgcctcgctctcccagagctctgggattacagatgtgagccacctggtccggcctagtctgcgcgtttctgctgggagtctttggcgtgcagaaactgaccgagggccatttctctgcagctgggcccggtgtgggcagaggatgctggggtcagtcacgcactccacggccacaacaaccttcgctcatacaatagtctctgcacccaagtcagccgcacagactccgtcacgtcccagccccggccccgtcacgcccacgacacacacacccgggcctgaggcgcgggctcccgcccctctgcgatactgcagtggccccgcttacctctctttaccccctgggccgcagcgcttttcctacagattaccaggaccgacgctccgggccaggactgctcactcggggcgcgaacccgaggcacagcgatgcccgaacggaggaagccgctgccgggtcacgccacaatccccggggcctaacgggctgcgcgcggaggctgctgggagggccgggcgcgctcacggagtgcgcaggcgcggccagtctcaagggtccgctcgctggtgcagcccctgctctgcgtgaacccggagccggagctaggtccgtcccagcgaggctgcgcttcgagtcccttagcgcctggggacggcgcggcagggcctggaggggagcggggacagatggctggcgcgttaaagaggggcgcccgcgaccgcctctctatagtgccaactagggagccctgtgagcgaggacggcgctgcgagtctgtccctggcgcgctcctgggtgggattctttcactgggtgtggctgttgggatttgagaccgtgtgactccggagattcggggaagccagttcctatattttccatttctgtatttttaaatggtaaaaacaatgaaaaggagaacaatattttgtgaaatatgaaaatcatacatgtcaaatttcagtgtccataaataaaagttttattggaacatagccgtgtttgattgtgtactgtctattgctatatttgagctacaaggacagactcgagtagttacacagaccagatggcccacgcagcctaaaatacagtcagttctcactattcacagtagttatggtctataaacttgctacaaacacggaattagtgaataccattccactgcttctaggggaaatacagggttagtttcctgtaagcatctggtcacattttagtcaaccgatgaatgcataagcttattttattgtgtttattttctttttttcttttttttttttttttttgagatagggtcttgctctgtcacccaggctggagtgcagtggtgggatcttggctcactgcaacctcctccgcctcccgggttccagcaattctcctgcctcagcccccagagtagctgggaatacagatgcatgtcaccatgcccagctgatttttgtattttgtagaaacggagtttcaccatgttgaccaggctggtctcaaactcctgacctcaggtgatccacccgccttggcctcccaaaagtgctgggattataggcatgagccaccgcgcctggccttattgtgtttctatttaaacactttaatatatattattgattcattaacattgaactcatggccaacagctccataactcatgcctgaatgaagcttatctaacacatgtattttttctgtaagacacatgaccgctttctcattcataggaacatcaacagcactttagtactactacatttggggtccctttgaaacagcaaaatcaccagcaaaaaacaaaaatatgagaagccaaggtactaaatggactgcaaaaagggtacctgtttacagtatgagagctgaaataagaagatagagggtcactttgtttgactttggctgagaacatgcctgttaagggactcaaaaaggttcaccgctcttcggatgtccacaaatgaccacaaaggtgctgcaaatattgactctgggtttataaaaaagttttagcaagtagatgaattcacaaattcagaatctgtgaatgaagattgactgtatttactatcaggccctttaaagaaaaagtttgccaatccctgtttttatatgtccctcttagttatacagctagtgtttaaaaactacttgaaataattattttccctgtgccaccaattatgtctataattgattgtaccccattaaataagcacaaagaaaaaagaaagctttctttatagaagaaggccagctaataactatcaagggtttgattttacgtggcttagacacgctgcttcaaatgcatttaagatgtttggttttaacaaggattttgcaacagtatagtgttttccttaagttcaatgtcatttctatgtcatggcagctgtcacctgcagttaggtaagacagtgacatcattaacatggatgcattttcatggcatgaaggctagccattgatggggtaatataacacaatttatcagtaaacgctgagttttctttgaagtcagtctctgatttcttacagtgcttgatgtctgccttgcctgctagtgaccaattcccctgcgtctttacagagccttgttactcactcagtgtaaagacagtgggggaaacaaggtttcccaaagtatccttatgtgcaaaagtgtttcttactactttggaaatactaagctgagtttaatgtttattctttttctaccaacagacacaaaaaggacaagcacatgccttagaatattcaatacaattttctacagcgatatggttaaatactcttctgtcttcactacttttttgtttttactttacttggaaattttaattctctaggaataacggggcaggagtctaaaataatactttgtgggagtgaagtatatatttttttccaagtaaaaaaaaaaaatcaggccaggcgtgatggcttaggccaggcgtgatgactcatgcctgtagtcccacatactcggaaggccaaggcaggaggatagcttgagcctgtgagatcgagattacagtgagctatggatcggccactgcactccgggctgggcgacagagcgagaccctgtctcaaaattaaaaaaaggaaaaaaaaaaaaaaaaaagtctgcgctccccggggcccaaggagaggacccaggagaggagtctggctccttttgcctcagacgagtccagggcgccgggttaactggtctaaagtcccaggcgctttctgggactgctcagccaccggccgctcccggcaccaggggacgccggacgccctctggacaatcggcgcacttgccacgatcttggacgggcctcgggcctcgaccttaagattccccgctccagctccgagatgtcagcaacgctgatcctggagcccgcgggccgcggctgccgagacaagccggtgcgcatcaccatgcgcggcctggcttcggagccgctggacacgctgcgcgcgcgtccctgcgcgacgagaaggctgggctcttccgctactgcgccgacgcccgcggcgagctggacctggagcgcgcgcccgtgctgggcggcagctttagggggctagagtccatggggctgctctgggccctggaatccaagaaacctttttggcgctttctgaagcgggacgtacagattccctttatcgtggagttggaggtgctggacggccacgaccccgagcctggacggctgttgtgacaggcgcggcacgagcgcgacttcctcccacaaggggtgcggagcgattcggtgcgcgcgggccgggtgcgcgccacgctcttcctgccgccaggacctggacccttcctagggatcattggcatctttggtaatggagggagcctgttggaatatcgagccagcctccttgctggccatggctttgccacgttcgctctagcttgttataactttgaagatctccccaagaacgtggacaacatacccctggagtacttcgaagaagccctatgctacatgcttcaacatccccaggtaaaaggcccaggcactgggctttggggcatttctctaggagctgatatttgtctctcaatggcctcattcttgaagaatgactcagacacagtttccatcaatggatccgggatcagtgggaacagaggcataaactgtaagcagaatagcattccaccattgggctatgacctgaggagaatcaaggtagctttctcaggcctcgtggacgtcgtggatataaagaatgatcttgtaggagggtataagaaccccagcatgatttcaatggagaaggcccagggccccatcattttcattgttggtcaggatgaccataactggaggagtgagttgtatgcccagtctctgaacggttacgggcccatggaaaggaaaaaccccagatcatctgttaccctgggactgggctttacactgagcctccttacttccccctgtgcccagcttcccttcacaaattactgaacaaacacgtgatatgggttggggagccagggctcattctaaggcccaggtagatgcctggaagcaaattctagccgccttctgcaaacacctgggaggtacccagaaaacagctttccctaaattgtaatgcgtttgtctgttgttgacatgagagagtcaagatcagattctagtgttcaataaccctatgtgaatcagctgtctcctggataacatt[137 bp omitted]gaaaccccatctctacaaaaaatacaaaaatcagccaggagtggtggcgggcacctgtgatcccagctacttgggaggctgaggcaggagaatcgcttgaacccgggaagcggaggttgcagtgagccaagatcatgtcattgcactccatcctggaagataagagcaagattctgtctcaagaaaaaaaaaattagtaaactagaaatctctgaacaaagtatcatacatgtaatttaattttcccatagatataggtaaagagaagttgttgagttacagcctctatctagcacagcaatctcctcaaaacacaaggtagccgcccggagaggccacagaggagatatctaagagatataacactggggatgtttgcaattggaaattaaatgacattttagaaatgtagttatcaatgtcaagccttgatagacatcagtctgaaacctaatacatgttttatatataataaatttaaacagcttaaattctcatccattcaaaatgggagaaaaactaagtaaatgtgataaatgtattgaggtgtttggctttcaatcaatgcttcctgatactcgaaaagtcttcacagggaaggaaccaaataaatgcagagtatggaaaaaatgaagccatacacatattattgtgtggtaaatatttccattgaaagtcaaatctttacactcaccgaagcatttccataagagaaaagatgtatattagaaatgtaaatgtttttatagcaattgaaatctttacagaggtagagaaatctggtaactgttattagtgtagtagggatttaagctaagttcttgtctcatggtagtcatccaggttcttgatgttttgaacaaagaattggacaaaatgcacaaagcaacaaaacaatgaagcaacggaagcacagatgtattgaaatgaaagtacactctacagagtgggagcaggaccaagcctcaaagagtgctggttacagaatttcctggggtttaaataccctctagaggcttcccattggttacttggttacaccctatgtaaatgaaggagtggcccacaaccagtctgattggttgcagaagacaggaccaatcagagactaaatagtagttaccaagttacgccctatgcaaatatctgattgattgcgggaggggaccaatcagaggtactttccatttttcatctgccacacagtgcaaaggtagtaacctctgatccttttgttatttgggtgtggagagacggggttttccttttgattcagttctaagaagtcagcgggaatggccttaggttccctgcctccagacctattctcctgtctcacctccatttatcactaaagagttcacaatacatgaccctccagaaaagagacatgtgacattaatatgtcagactcaaccagtgtcttcacactggaatgactttattagtgtgaagctggagtaacattttatcattagcacagaacgagaagcattgcagatgatagagccttttttggtcaccaagtgacgcagccagtacactgttgactagcagtgatggtagcaggccttcttgccttggtcctgatcttaaagggaaagatttcggtatttcatcactaagtaaaaaatgtgttgttggttttttgaaacagggtctccctctgtcgcctaggttggagtgcaatggtgccatcagggctcactgcagcctctacctcctaggctcaagtagttctcctgactcagcctcctgagtagctgggacaagtaccaccacacccagctaatttttaaaattttttgtagagatgaggtctcactatattgcccaggctggtctcaaactcctgggctcaagtaatcctcctgcctcagcctcccgaagtgctgggattacaggtgtgaggcaccatgcccatcaaaaaatgcgcttaaatttctccctggatatcctttcttagaagtttccttgtatctctatttttccaagaggcttgatgataattggatttgaaattctatcatcttttctgtatcttttgagatgatcctggggttctttctaaattaatacgttaatgtggggaatcatattaactgatttttaaataataagtcaaacttgcatttctggaataaatatctcaagttggtcataatctagttggctaaaaattaataaagttgtttccttaatgatttagataagaactttgcatctaccttcatgaatacaactaccccataattttcttttctcatactgtctttgagagattttgaaatcaaggtgatattttctttctttgatttttttttttgagaaaaagtctctctctgttgctcaagctggagtgcagtggcatgatctcagcctactgcaacctccaactcctgggttcaagagattctcctgcctcagcctcccgagtagctgggactacaggcacatgccaccatgcccagctaatttttgtgtttttagtacagacggggtttcactatgttggccaggctggtcttgaactcctgacctcgtgatccacccatctccacctcctaaagtgctgggattacaggtgatcatattttcattaaagaagtcactgtttctgcctttttattctctgggaaagtttactatgtaaggttggaattcttcttaacttgaatgggttggtagaacttttcaattaaatcatttggaactgaaattctctttctgggttgctgtttgctgatagtcattccaaaaacttctatgccaaaaaagccacacactaggtatcttggttcatagtttactcagtgtaacacataataaatatctccctgaagccaaggaagaggccaccttccacccttcagggaacagcagtgagttcagggaacagtaatctctttctcaattccagctggtcttacctatagttcttgtgtgccagattcccttttgtatgttttgtacctttgtggatttgattacaagtggggtcgcaattgtggatagcctgaagatatgagaaatgtctattgtgggaaggtaatgaaggagagttggtgaccagcaggacgagagctttagccatggggctaataagacagagccaagtcagcagggacataagatgtaagagggctctggtgctcaggtagaactggataaaggatgggtgagctggagttaaacgttccatgtcataacaccaggaaagcaataaaaatgtttttattgtggcaaaatatacataatataaaaagtcaccattttaaccatttttaaagcataacatttagaggcacttagtgaattcacagtgtttttttgtttttgtttttgtttttgttttttgagacagagtctcgcattgtcgcccgggctggggtctggagtgcagtggcacgatcttggctcgctgcaacctccacctccacctcctggattcaagccattctcatgcctcagcctcctgagtagctgggattgcaggtgcccaccaccacacccagctaatttttgtattttagtagagatggggtttc[144 bp omitted]atttaatcaccactcccctaaaaaaagaaataaaaataaaagccactgataaggtttggctctgtgtccctacctaaatcgcatctcaaattgtaatccccataatccccatgtgttgaaggagggacttgatgggaggtgattggatcataggggcagtttcccccatgctgtttttgtgatagtgagtgagttctcaccagatctgatggttttataagtgtttgacagttcctccttcacactctctctctcgcctgctgtcatgtaagatgtgcttgcttccccttccgtcatgattgtaagtttcctgaggcctccctagccatgcggaactgagtcaattaaacatccttcctttataaattacacagtctcgggcagttctttatagcagtgtgaaaacgaactaatatacctacatatcttctaagttgctttccattccttacttcctccagccatggcagctactaatctgctttctgtctctatggatttacctgttctagatactttcatacgagatgagcccttttatgtctgactcctttcacttagcataatgttttgaatattcatccatgctgtagcatacatcaatactttatttctttttctagctgaatactattccattgtatgaatgtaccacattttgttgatccatcagtagatagaagtgcgttgtttctaccttttcgctattgtgaatattgctgccataaactttgtggacaagtttttgtttaaacactcattttcaattcttttaggtatatactcaatatatacaagtgggccaggcatggtggctcacacctgtaatctcagccctttggaaggccaatgtgggcagatcacttgaggccaggatttcgagaccagcctggccaacatggtgaaactctgctctactaaaagtacaaaaattagctgggtgtggtggcgtgcacctgtaatcccagctacttgggaggctgaggcatgaaaatcacttaaattcaagaaggggaggttgcagtaagccaagattgcactccagcctgggcaacagtgcaagattctgtcttaaagaaaaaaaagtctttaaaaaataatatatagcatatttatatatatatacacacatacacacaaagcatacatatatatatatatatatatatatatggaattcctgagtcatacagtaattttatgtttaatttattgagtaaccaccaaacttttttccacagcagctacaccatttacatttccataaacaatgtatgatagttccaatttcgctacattctcactagcacttattttcctttaaaaaaaaaattattggccagacacagtggctcacgcctgtaatcccaacactttgggaggctgaggtgggcagatcatgaggtcaggagtttgagaccagtgtgaccaacatggtgaaaccccgtctctactaaaaatacaaaaatcaggtggacgtggtgctgcacgcctgtaatcccagctgctcagcaggctggggcaggagaaatgcttgaacccaggaggcggaggttgcagtgagccaacatctggccattgcactccagcctgggcgacagagcaaggctctgtctcaaaaaaaaaaaaaaagatttgtccttgaatgttcatagtagttttattcacactgccaaaaactggacactacccattctctatcaactggtaaacagataaacaaattggaagatgtccaaaaaatgcaatattactcagaaaacaaagaataatttactgatatatgcaacaacatgaatgaatctcaaaagcactgttaaatacaagaagctttacataaaagactacatactgtatgattctatttatatgaaattctagaaaaagtacaactattgtggacaggaagcagaacagtggccctcaggggctggggcaggggatgg[131 bp omitted]gagaaaccccatctctactaaaaatacaaaattagctgggcatggttgtgcacacctgtaatcccagctacttggcaggctgaggcaggagaatcgcttgaacccgggaggtggaggttgcattgagccgagattgtgccactgcactccagcctgggcaacatgagggggtgggtgcagtggctcatgcttgtaatcccagcactttgggaacccgaggtgggcagatcacttatggtcaggcgttcaagaggagcctggccaacatggtgaaaccctgtctctactaaaaatacaaaaattagccaggtgcagtggcactgtagtctcagctactctggaggtggggagagaaggtgcagtgagatgagatcatgccattgcactccagcctgagcaacacagcgagactcttgtctcaaaaaaaaaaaaaaaaaaaaggcatgagggagctttctgagttgatggaagttctgtatatcatgattgtgttgtggttgtgaaaggaacacatcttgggcccccaaaatcactaaagtaaagagaaaagtcaagctgggaactgcttgggacaaacctgcctcccattctattcaaagtcattcctctgctcactgagataaatgcgtatctgattgcctgtttggagaggttcatcagaaactcaaaagaatgcaaccatggccaggcacggcggctcatgcctataatcccagcactttgggaggccaagccgggcagatcacctgaggtcaggagttcgagacatggccaaaccgtgtctctactaaaaatacaaaaaaattagctgggcgtggtggtgggcacctataatcccagctcaggaggctgaggcgagagaatcgcttgaacctgggaggcagacgttgcagtgagccaagatcatgccactgcactccagcctgggagacaagagtgaaactgcgtctcaaaaaaaaaaaaaaaaagccataaataaaaacaatgcaaccgtttgtctctcacctacctatgacctgtcctacctttgtggaccgaaccaatgtttattttacatatattgattgatgtctcatatcttcccaaaatgtttaaaaccaagctgtgctctgaccaccttgggcatgtgtcatcaggacctcctaaggctgtgtcacggacgcatgtcctcaaccttggcaaaataaactttcttttttttttgagatggagtctcactctgtcgcccaggctggagtgcagtggcaagatctcggctcactgcaacctctgtctctcaggttcaagtgattctcctgcctcagccttccgagtagctgggactacaggcacccaccaccatgactggctaatttatttatttttattttttatttttagtagagccggggtttcaccatgttggccaggctggtctcaaactcctgacctcgtgatccgcccacctcggcttcccaaagtgctgggattgcaggcgtgagccaccgcacccggcggcaaaataaactttctaaattaactaagacctctctcaaatttttgaggttcactggtaataattacatgattacatgtatgtcaaaactcatcaaattgtacacttaaaattgataaattttgttgcatgcaaattttccctcaataaagctgattaaacaaaacaaaaacagaagcaccaagattctagaaaaattgtgcctccagcagtagtttttgaatcttccaaaatccccaaataaaaatagagcaatcagacagcaaaaccaaaatcttgttgacagcattcaaacaaaactacgtgagataatgtgatgggctgaattgcatgcttccaaaattcgtatgtttaagctgtaacccccagtacctcacaatgtgagtgtatttggaggtgcagccttcaaagagatgattaagttaaaatgaggtagttagggtgggtcctaatcctatatgactgttgtccttattttatcttttttttttttttgagacaagagtctcactctgtcacacaggctggagtgcagtggcttgatcttggctactgtaacctccacctcctgggttcaacgattctcgtgcctcagcctcccaagtagtggggactgcaggcacgtgctatcatgcctggctaatttttgtatttttagtagagacggggtttcgccatgttgcccaggctggtctccaactcctgacttcaggtgatccacccacctcagcctcccaaactgctgggattacaggtgtgagccaccatgcccagcctggtgtccttattttaacaaaggaaatttggatatgctgaggcaccctaaggatgtgcacacgcagcgtgaatgccgtgtgaaaatccagcaagaaggcagttgtctgcaagccaaggagagagtccttaggataaaccagacctgccaacgccttgatctgtgacgaaaagcctctagagctgtgagaaaataaagttatgtttaaactacccagctgtggtaatctgttacagcagtaccagcaaactaatacaggaaatgtccccatgagcccccaaatataagcagatgagaacaatcataaacatcacaatacctgcatggtggacctgagcatctgtgaaggaggcagccaggggaagtgatggggcatctgaaatcatctgaaaacagaagagcctcaaaacgagtattaacacacagagggggttgggtgcggtagctcatgcctgtaatcccagcactttgggaggccaaggcaggcggatcacgaggtcaggagttcaagaccagcctggccaacgtggcgaaaccccgttgctactaaaaatacaaaattagctgggcatggtggcaggcacctgtaatcccagctactcaggaggctgaggcaggagaatcgcttgaacccgagaggcggaggttgcagtgagccaagattgtgcctctgcactccaacctgggtgacagagcaagattccatctcgaaaaacaaaacaaaacaaacaaaaaaacacagagggccatgctgacagcagcagcagagaggggttgaggcttttcctacaccaacaggaggggagtgcaagtggtccacaagggaagacctgaaggggccagtgaactcttcgctgtgacagctcttaaaactgacagccaaaattcctttccatctctaaataaatagataaataataagcaacaccagccaggcatggtggctcatgcccgtaatcccaacattttgggaggctgaggcgggtggatcacttgaggtcaggagttcaagaccagcctggccaacatggtgacaccctgtttctactacaaacacacaaaaaattagatgggcatgttggcgcactaaatcccagctacatggaaggctgaggcaggaggatcatttgagccttggaggtggaggttgcaatgagctgagatcccaccactgcactctagcctgggtgacagagtgagactctgtcttaaaaaataaaattaaatgtaattccagcactttaggagacagaggtgggccgatcacgaggtctggagtttgagaccaccctggccaacatggtgaaaccccgtctctactaaaaatacaaaaaggcatggtggtatatgcctttagtcccagctacttgggaagctcaggcagaagaatggcttgaacctgggaggcggaggttgcagtgagccgagatcgtgccattgaactccagcctgggcgacaaagcaagactccatctcaataaataaataaataaataaataaataaataaataaaatttttaaaaaaacaacagaaaagtatcaagcatgaagtccctaagagttgcaatttaaaagagagagagaataaggaacacaataacattcctcccgacaataaaagcgtatcagaaagccatgcccacaggagatcagaattggaacttgctatttcagactgagctaaaatttcattaacaaaatgatacaagatatgaaagaacaaaatcagttagaatcagaaaatgcgggaaatgaggtaataattcagaaaataattcaaataaaaatcatttcagaaatgaaaactaaactaaaaggaccaccacaaagaataaacacaacaaatgtttatgagaaactgaaggtaaaaatgaggaaaatttcttttgtttggagcaaactcgttaactgaaaaatgaggataatttcttttttttttttttgagatggagttttgctctttcgcccaggctggagtgcagtggcagatctcggctcactgcaacctctgctttctggtttcaagcgattcttctgcttcagcctcctgagtactgggattacaggcgcccaccaccacgcccagcttatttttgtatttttagtagagacggggtttcaccatgttggccaggctggtcttgaactcctgacctcgtgatccacctgcctcggcctcccaaagtgctgggattacaggtgtgagccactgcgcccggccaaaatgaggataatttctaaaattggatggaaatgaagaaagtgacaaaacaaaaaaaaaagacctgagagaaagagacaaacatagaagacagttcaagaagatcaaatacataaatagaaggttctaaagaaccaagccaaagcaaaagaaaagaacaaatactaaaatgttataattataataaaacattttctgaaataaaaaagatgtgtatcactagtgagaggtataagtgacttaaaaagcaacaaaaatcaggttgtcatttaccttctgacagttgtaaatagtaagtagaaaatagagtaacaggccgggtgcggtggctcactttggaggctgaggtgggcggatcacttgaggtcaggagttcaagaccagcctggccaacatggtgaaaccccatctctaaaaaaaaaaattcaaaaaaattagcctggcttgatggcgagcacctgtaatcccagctacttgggaggctgaggcaggagaatcgcttgaacccaggagacagaggttacagtgagccgagatcatgccacagcactctagcctgggaaacagagcaagactctgtctttaaagaaaaaagaaagaaagaaaaagaaagaaaagaaaatggagtaacatattttacatactcagtgcaagaaaagatatggcaaatattttatatccagcatagcaaaatcaaatacttttatcaacatatgagtgtcagggactcttgctggttaaaagacttaaaagatatgtcaagtaataaaaaagggaaggcaaaagcatttagggatgtgcaaatggataataatattataaaggaacacaaggaagtgatcactataaaagttaggagagggatgggctcagtggctcacgcctataatcccagcactttgggaggccacggcaagtggatcacctgaggttgggagttcgagaccagcctggccaacatggcaaaatcccgtctctaatagaaatataaaaattagccaggtgtggtggcaaacgcctgtaatcccagctactcaggaggttgaggcaggagaattgcttgaacccgggaggcagaagttgcagtgagccatgattgtgccactgcactccagcgtgggcgacagagtgagactctgtctcaaaaaaataaaaaataaaaaaaagttaggagagtggaactggttacttttaaggacagggaacacagaggaacttctagattatctagcaaagttctatttcttgacctgagttctggttacacaggtgtttgtcttgtaacaattcatttggctatatttttatgttatagttttgtttttctatatctatgttttattcttacaatttaaaaagtttaaaaacccaagtcttaggaattgtcacctttcccctccctcaaaacatggaaacatggaaaggaagaggcataaaggtcagtgctgaaattatctccttaaaatacgtatggggaggccgggtgtggtggctcacgcctgtaatcccagtactttgggaggccgaggcagatggatcacatgaggtcaggagtttgagaccagcctgaccaatatggtgaaaccctgtctctactaaaactaccaaaattagccaggtgtggtggcgggtgcctgtagtcccagctactcgggaggctgaggcaggagaatcacttgtaccagggaggcggagcttgcagtgagccgagatcgcgccactgcactccagcctgggtgacagagtgagactccatctcaaaaaaaaaaaaaagaagaagaagaaaatatgtatagggacctgcaaaaatgacatagattttcaaaagaatcgaataaaactttcatatgtgaaaagtacaataatgaaaattaaatattggccaaatgcagtggctcacaactgtaatcccagtactttgggtgggaggattgcttgatccctggagtttgagaccagcctaggcaacatggcaagaccctatctctaaataaaatataataaatgaaactaaaatacaataaaataaaattagctgggcatggtggtgcatgcctgctactcaggaggctggggcggaaggtagaggctgcagtgagctatgatcacaccactacactctggcctgggtgacagagtgagacctcttctcaaaaaaaaaaaaaaaaaaagatatgtaggacagagtgagaaggtcaaacatatttttagttggagttccaattaaacatcaatattagaagaaacaatagctggctgggtgtggtgactcactcctgtaatcccagcactttgggaggccgaggcaggtggatcacaaggtcaagagttcaagaccagcctggccaacatggtgaaaccctggctctactaaaaatacaaaaattaattgggcacagtggtgcgtgcctgtaatcccagctagtcgggaggctgtggcaggagaattgcttgaacctcagaggcagaggatgcagtgagccgagattgtgccactgcactccagcctgggcgacagagcgagactccagctcaaaaacaaaaagaagaagaaacaatagccgaacaatttccaaagatcatgaaagtccctaaaccattgactcaaatcccttaacctagacccatcatggacaaactgcagaaaaaccaaagataatgagaaaatcttagagcagcaaaagtaaaaaggataaattaccttcaaagtagtcattagactgacagctgacttctcatagcagtaatgaaagtcaagaatgaaacgatagcttcaatgtactggaaaaaaaaaagcccaatgtagaatttcatcaatggacatagggaaaatgatgtcaaatggaaatattgttatgcaaggaggaatggaaagcaatataggaattatgggggcaaatgtgaatgaatattgattataaaaagcaatatatgttgactgggcacggtggctcacacctgtagtagcactttcagaggctgaagcaggaggattgcttgagcccaggagttcaagaccagcctggacaacatggcgaaaccccatctctacaaaatgtacaaaaattagctggtcatagtggcgcatgcctgagaaagagataataaaaatacaagagaacaataatccacattgaaagtaggtgaatacatgtagctagagtagcctaagtactttctattgtcgtgggaatgaataaaggtgtgaactgcgaaagctgtaacattcaaaatagggtcacttgtgtcaaaccctggcaaattaagccaggggaaggccataaagagagagctctcacacacaatctgactgataacaggcaaatatttcacaagaaatttttccagactgcagcttacttcatgagtcacacaagcccagctacctgcttatacaaaaacacttgcctatttcaaaattggctcacagacccaatccaaaactgcaaggacctaaccattactctgagattacaaatcctacctggcaactaatgacacacaccaatcagaactctccagctcttgtaaaacgctgccagcaccaatacattttatttatttgtttgtttgtttatttatttagagacagagtctggctctgtcacccaggctgcagtacagtggcgagacctctgcctcccaggctcaagcaatcctcccacctcagcctcccaagtagctaagactacaggcgtgcaccaccatgcccagctatttttttgttttttgggtttttattattattattattattttttgagatggagtcttgctctgtcacccaggctggagtgcaacacactgcaacctccgccttccgggttcaagcgattctcctgcctcagcctctcaagtagctgggactacaggcactcgccaccatgcctggctaatgtttgtatttttagtagagaggggctttcaccatattgaccaggctggtctcaaactcctgaccttgcgatccacctgcctcagcctcctaaagtgctgggattacaggcgtgagtcgccaagcccggcccaatttttgtatttttagaagagacaggattccaccaagttgcccaggctggtctcaaactcctgggctcaaagcatccacccgcctcaaccttccaaagtgctaggagattataggcatgaggcactgtgcccagccaagtaaatttgatttaaaaacaactcacataacctcctctttacccaataaactctaaacttttcatttgttctctagacataccagacaccacgcgtctatgtatgtcctgaattgcagttctacttcttgtatattattcccaaataaaaccttttacttagcgattcgtctctatgtctttttacgttgacacaacttttttattttaagttttaatttttatgggtacctagtaggtgtacacatttatggggtgcatgagatattctgatacaggtatgcaacgcataataatcaccagggtaaatggagtatctgtcacatcaagcatttgctgtttatgttataaacatcccaattatacccttttatttttaaatgcacaataaattattgtcgactgtaatcactgtgttgtgcttttgacataactgttttagactttgatggattttgttatgcatggtattttctaaggtaattcttaaagcatagaaataatatatagaatttccaagctagtaaccataaacaacgacatgattattaaagctcctgaagaaaacaaggaggaaaaatatatatatatatgtatatataattgacaagataaacaaaagaacaaagatagatttaaaaccaaatatattagtaatcacatcgaataaaagtgaatataatactttacttaaaagacaaaggtggggccgggcgcggtggctcacgcctgtaatgcaagcactttgggaggccaaggcgggtggatcacaaggtcaggaattcaagaccagcctcgccaacatggcgaaaccccatctctactaaaaatacaaaaattagctgggcatggcggcgcgtgcctgtaatcccagctacttgggaggctgaggcaggagaatcgcttgaacccaggaagcagatgttgcagtgagccgagactgcgccactgcactccaacctggcaacagagcgagactccgtctcaaaaaaaaaaaaaaaaaaaagacaaaggttgtcagactggaattttaaaagttcaagtatagtccgggcgcggtggctcacgcctgttatcccagcactttgggaggccgaggcaggcggatcatgaggttaggagatcgagaccatcctggctaacacggtgaaaccccatctctactaaaaatacaaaaaaattagccgggcatggtggcgggcgcctgtaatcccagctactcgggaggctgaggcaggagaatggcatgaaccgaacccgggaggcagagtttgcagtgagccgagatcgcgccactgcactccagcctgggccacagagcaagactccgtctcaaaaaaaaaaaaaaaaaaaaaaaaattcaggcatattgtattctcaaaagccatctttaccttaagaatgcagaaacattgaaattaaagatggaggccaggcacagcggctcatgcctgtaatcccagcactttgggaggccgaggcaggcggatcacttgaggtcaggagtttgagaccagcctggccaacatggtgaaaccccgtctctactaaaaaaaaaaaaaaaaaatacaaacattagacgggcatggtggtgtgcgcctgtaacctcagctactcaggaggctgaggcacgagaattgcctgaacgtgggaggcggaggctgcagtgagctgagattgcaccactgcgctctagcctgggtgacaaagtgagacattgtctcaaaaaaagaaagaaaaagaaaaagaaattaaagatggaaaaactaacaataaacaagcaagttcatgtaactatactacttaaaataacagaaacttttttttgttgtttgagacggagtttaactcttgtcgcccaggctggagtgcaatggcgcaatctcggctcaccacaacctccgcctcccgggttcaagcgattctcctgcctcagcctcccaagtagctgggattacaggcatgcaccaccacgaccgggtaattttgtatttttagtagagacggggtttcttcatgttggtcaggctgatctgcccgccttggcctcctaaagtgctgggattataggtgtgagccaccgcgcccggcccaataacagaaactttaagacaaaatgcattgtgagacatatcttgcttcaaaatcctataatgatcttgtctgaggtagttaccttgcaagggtgttactgtttttcttgctccccttgtaatatccagaccataaaatgtaataaaaacctcagcattctctcaatgaccaattataaaatcaaacccacatatcaaaaatattgccagattttgaaactttatctaaaaataatatggagaatagatgaaagagcaccttcaccagagacacaacagtggttacaaaaaaatggaaagtgagaacataatgcagctatttggtgctccttgtgaccatgggcaacagatgaaaggttggggtgggagaggtaagggagagtaggttggtgtttgctgggctgattgatcctggctctcaagggggaaataggtttgaaccttctaaatgtaacatggatagaatgcaaagattcccctgggtcaactcctacctctgtcttttacaatagaaaaagttaatagaaaactatagtaactaataataattcggatcctatgaaagaagattcgagtcactttaaaaacttccaatcacagctgggtgtggtggctggctcatgcctgtggtcccagcttttgggaggccaaggcaagaagatcacaagcccaggagttcaagacgagcctgggaaacatagtgacacactggtgctaaaaaaaattaactggacattgcagcacatgcctgtagtcccagtcacttggcagagactgaggtaggaagatggcttgagcccaggacatcaagactgcagtgacccatgatcgtgcccctgcactccagcctgggcaacagagctacaaccctgtctgaaaaacgaaagaaagagagagagaagaaagaaagaaagaaagagagagagagagagagagaaagaatgaaagaaagaaagaaagaaagaaagagagagagagagaaagaaagaaagaaagaaagaaagaaagaaagaaagaaagaaagaaagaaagagagagaaagaaagaaagaaaagggggggagggacagagggagggaagaaaagaaaggcgggccaggcaaggtggctcatgcctgtaatcccagcgctttgaaaggctgaggcaggcagatcaagaggtcagcagtttgagaccagcctggcctacatggtgaaaccccatctctactaaaaatacaattagccaggcgtggtggcgggtccctgtaatcccagctactagggaggctgaggcaggagaattgcttgaacccgggaggcagaggttgcatcgagccgagattgagccatcacattccagcctgggcaacagagcaagactccgtctcaaaacaacaacaacaaaccctcccaatttgctaagtaaaagggaatgagtcacaactatgatttatagaaaaaaagactggagcatctatctgattaacatacagttatatattattactgattacttcttttttactcccctttttcctttatgtagcttttcacatgcttatatgtatggggtacatgagatgttttgataaaggcatacaatgtggaataatcacgtcaggggaaatgggatatccatcacctcaagtatttatcacttatttgtgttacaaacatttcagttctactctgttatttttaaatatacaataaattattgttgactgtagttaccctggtgtgctgtcaaatactatatcttattcatactatctaactatatttttgtccccactaactatccctactatccccttcccctgcccactatctttcccagcctctggtgaccatcattctactctctatctccatgagttcaatttttaatttttagctcccacaaatgagtgagaacacgtgaagtttgtcattctgtgcctggcttatttcacttaacataatgccctctagttccatgcatgttgttgcaaatagcagtatctcattctttttatggctgaatagtactccattgtgtatgtataccacattgtctttatccattcattgattgatggacatttaggttgcttccaaatcttggctattatcaacagtgctgcaataaacatgggagtgcagatatctcttcaatatatgaatttcctttcttttgggtatatatctagtggcaggattgctggatcatatggtagctctattttttttttttttttttttttttttgagacggagtcttgctcagtcatccaggctggagtgcagttgtgcgatctcccctcactcaagctccgcctcccgggttcacgccattctcctgcctagcctcctgagtagctgggtctataggcacctgtcaccatgcccggctaattttttttttgtatttttagtagagacagggtttcaccatgttagccaggatggtctcgatctcctgacctcgtgatccacccgcctcagcctcccaaagtggtagctctgtttttattttcttgaggaaactccatacttttctccatagtagctgtactactttacattcccaccaacagcatatgagggttctcttttctccacatcctcaccagcacttgttattgcatgtcctttggataaaagccattttatttttattttattattattattatttttgggacagagtttcactcttgttgcctgggctggagtgcaatggtgcgatttcggctcactgcaacctccacctcctgggttcaagcaattctactgcctcagcctcccgagtagctgggattacaggcacccgccaccacacccggctaattttgtatttttagtagagattggggtttctccatgttggtcaggctggtctcgaactcctgacctcaggtgatccacctgcctcggcctcccaaagtgctgggattacaggcataagccactgggcccagcttcctaaaacccctttttaactggggtgagatgatatctcattgtagttttgatttgcatttctctgaggatcagtgatgttgagcaccttttcacatatctgttggccatttgtatgtcttcttttgagaaatgtctattcagatcttttgcccatttaaaaaatcagattagattttcttcctgttgtttgagctccttgtatattattaatcccttgtcagatggatagtttgcaaatttttttcccatgctgtgggttgtcccttcactttgttgattgtttcctttgctgtgctccagaagctttttaacttgatgtgatcccatttatccatttctgctttcattacctgggatgttggggtatttattactcaagaaatctttgtccagaccaatatcctggtctttaatcttttttttttttcttccctggctggaatgcaatggcgcgatcttggctcactgcaacttccgcctcccaggttcaagtgattctcctgcctcagcctccaagttgctgggattacaggctcgcaccgccatgcctggctaatgtttttcatattttattttttgagacggagtcttgctctgtcgccaggctggagtgcagtggtgtgatctcggcttactgcaacctccacctcctgggttcaagtgattctcctgccttagcctccaaagtagctgggactacaggcgcgtgccaccatgcccagctaatttttgtatttttagtagagatggggtttcaccat[137 bp omitted]cccaagctggagtgcagtggcatgatcttggctcactgcagcctctgtcttccaagttcaagcgatcctcccgcctcagcttccagagtttctgggattacaggcacatgccaccacacccagctaatttttgtattttagtagagacggggtttctccatgttggccaggctggtctcaaactccagacttcagctgatccacctgcctctgcctcccaaagtgctgggattataggcatgagccacaatgcctggcctcattttgatttgatttttgtatatggtgagatgtaggggtttagtttcagtctgcatgtggatattgttctcccagcaccatctactgaagagactatcgtttccccaatgtatgttcttggcacctttgttgaaaatgagttcactgtagatgtacggatgtatttccaggttctctattctgttccatcggttgatgtgtctgtttttatgccagtaccatgcagttttggttactatagctcagcagtataatttgaagtcaggtaatgtgatttctccagttttgttctttttgcttaggatggctttggatattctgggtcttttgtggctattttagggctattttttctatttctgtgaataatgtcattggtatttttatagggattgcattgaacctgtggtttatttctgtagtttacacttaaaagtaagatgacagaatgtctacacagaatcctcacagatataaagtatagatattgcccatcacattttcagttgaatgaaaatgggatggaaataggaatagaaaatctattttctataaagtaggaatagaaaatcatagcctgtactagagaccatggagaaattaagggtccaatgaagggaggtaatatacacagttttaacacatttcaccaaggcaataagtcatttctcttataacacacaaacaagagtagggctaaaaataggaagaagaaaacaaaatctcaaaaactggctgttctgtaaaaaatgagtaaaatatggttaaaaaaaaaaagtgctgcccaatacccactctcaccaggtctgtggtctgcatatgcaataagaaaataagatggcccaggcgcagtggctcatgcctataatcccagcactttgggaggccaaggcgggcggatcacaagttcaagagatcgagaccatcctggccaacatggtgaaaccctgtctctactaaaaatacaaaaattagctgggcgtggtggtgtgcacctgtagtcccagctactcaggaggctgaggcaggagaatcacttgaacccaggaggcagaggttgcagtgagccaagatcgcgccacggcactccggcctggcgacagagggagactccgtctcaaataaaataaaataaaatagatataaaaaatattgtgagataggtatgtcacctttatctgcagattatataactatagagcccaaaagaatctatcaccttataagcagaactctaataaattttcaggtattactagcatattttaagtattgtgagacatcacagtagatggtgttattattagatattagagagtcaagaggatgaagagttataaaagaaacctcaagatgtgttaatgaattccattcagtgtcaattgtttattcatgtaggatactctgcatttaaactgaatgaaattcaaaatataatcctaatggggttttcattggaaaataaatgagtcaaaaattctcatgaagaaacatctttatttccaaataataaactatatattaataatatatacatacatctttatttccaagtaataaaagctattgaaaagtgtcaaggattgctagaatatggagaacagaaatagatgtgagcatttaatatacaactgatagtattttaattcagtaggagaaaggtgaataatagttacttctggcataactggttttattcctggatagaaacaagtctgacatcctgcattagatcgtataatcaattcctgatgtattaaaatattaaatctctgtgtatacacactcacagaatcacatatatgaaaaactgcactccactcctttattctcttgccctctgaaatcttccagaagcaaaaccttcctaggaaacatagaaaacactggaaatgacgccgggtgcggtggctcatgcctataatgccagcactttgggaggccgaggagggtggatcacctgaggtcaggagttcgagaccagcctgaccaacatggaaaaatgccgtctctactaaaaatacaaaattttccaggcgtagtggcatatacctgtaaccccagctacttgggaggctgaggcaggagaatctcttgaacccgggaggcggagattgcagtaagccaagattgcgccattgcactccagcctgggaaacaagagtgaaactctgtctcaaaacaaaacaaagcaaaaacactggaaatgacttgggaagcttattttatagaaataaaacagacaagaatacaaagtgtttgttgcagcattacttttagatggcaaaaaagcgcaaacaatccataatatcacaattgggaaagtggttgaaaaggcattggtaaataacactgtggaacatactgtaaccatcagaaagactgttagatcatcatctattgaaggaaaatccaaaatgtacagttgaatgtaaaaaagcaaatttcagggaaatgtatagttatccatttttctgtaaaaacataataaaataattgtgtgttaatgttttagcatgaagaaatatatgggtaatatacacaacctttaaatattattcagaagaaaattgacagaggggagggaatgaggaacggagaagggcaaagataatcattttttctttcttttttttttttttttttgagacagattttttgagactctgtcatgcaggctggagtgcagtcaggatctcagctcactgcaacctccgcctcccgggttcaagcgattctcctgcctcagccttccgagcagctgggactacaggcacatgccaccacgcccagctaatttttgtatttttagtagagatggggtttcactatattggccaggctgccccctgccttggcctcccaaagcactgggattacaggcgtaagccactgtgcccagccccttttctttctctttaatggtattgtttcattaatttgggtgcaaatgcactatctctataattttagatgaagaactttataaaagacataagcacacaagaaaagaaagtaaacaaaatctcatttggcagttttcattttgataacgcaaaacattacaacagtccatttttagtaattctctcatttgcaggtatttttgctcactctacttttctcaaatttattatgaaatattttacttccttatgccagtaaagtaaagtaacacaatgttcagagagacccgtctacacaggatctaagaaaaaaggaagtggggcataaaataacagttctacagacataaacttcatccttccacatatgcgatctgtccagcgtggggagctgcttgctgagcatgttttgagcacagggaaggcccatttcaaaacactaacttaaccccaaacaaagctacactgtggactttttttttttttttttaatagtctcattctgtcgctcaggctgaagtgccatggcgtgatcttggctcactgcaacctccacctcctgcattcaagtgattctcctgcctcagcctccccagtagctgggattacaggcatgtgccaccatgcctggctaagttttgtatttttgagtaaaaatggggtttca[140 bp omitted]ttttccttagaaagaaactggatttggtgcttcattagtaatagttaactgatcacatgctaatttttccctgttctctgtgtttatgagagtctttgaagagtcctaattttcttggagtcaatattgatgtatattttccttaaaaaccattttgtttaaattttcaaacatattagaaaaaagcataatattcaacagaaccttttaaatctgtaactatgtttctatctctgtccattttttaaatatgatgctgtttctcttttcatactttttttcctcattagtgcaccaatattttgcttatgttctcttttcttttttactgggtatataatgcgacaaaaagagtattagtcggaataaagtccttcacacacattattcacagtactttcccccccaacacctaggattatttcatgttcaatagtaagtacatgatgatgggaaattttcttaacttgttaccttcaaagggtctttcttcagtcaaacaccctgcctaatggtgactaagttctgcagaagttaaaaagcctttctacaaataataatactgatgatgatgaatataataacgatgactaacattcagtgagtatgtatttatcatgtcaggcacaattctaagcactttatcgatcttaattcatttaatcctcacaaagcattatgaggtaggtattataattatcccccattttataatttttactgagacacgcatgtatatatgaacagaaaaatgatcagcaataaataatgaactgataaagactatcctttgggatatggtcaaagggtacatttgcctttttgtaatgtttgcatcttttataaggaaaatatattcacacattacttctgcaattaaaagatatgatacaaagatgtgcttagggagaatgtccagcagggacttgtattttggcatgtattatggcaaaatatctagaggagactacgatatccaccaataggatttcataagtgatattacagtaacacaacaaaacaccatgaagataatgaagaatctctattgagtaaaatgtcgttcatgaacatttttacaataagaaagccttaatgttataaagaacaaaaagaataagccatcttcaaaaataaagaggtcacttctcccaggtactaaaggtatttttaaaatagtatacaaatcaggatgtaaacagatgaaatttatagccatataaatttaatatggattaaaatactaagaatgtaacaattagagaaattaggggaaaaaatgacaatcacaggactacatttctacaaaaattctctgacgttaagaaggttagaaaggtgttaaaagtgctgtcattttcagtatgacagactgaattatctatcatattgctagactgaattatctgatgtcaagagaagtaagcgtttagttaagggcttccaaagtatattctattcatagagtatttctccaacattatttttcccaggctgaataagctgtagtccacaaataaaatgtttctacattattctatctagaggaattattaacaagataaattctgttttgagccataattaaaagcctccctacacatttcatatattctgtttcatcaccagtacaaattttgatgctgaataagttgtgggtcataattaaagttctttccacattccctatattcatagggtttctcactagtatgaattctatgatgactaataagctgtgaactctgagaataagccttcccacatatcttacattcatagggtttctccccagtatgaattctctgatgtctagtaaggtctgagccagaacgaaaagccttttcacattccttacattcgtaaggtttctcacctgtatggattctttgatgtttaataagttgtgagctctgactaaaggcattgccacattccttacattcatagggtttttccccagtatgaattctctgatgttgagtaaagtttgagccactactaaaggccttcccgcattctttgcattcataaggcttctcacctgtgtgaattctctgatgtcgagtgaagtttgaaccactactaaaggctttcccacattccttacattcatagggtttctcaccagtgtgaattctgtgatgtcgagtaaggtctgagccacaaataaaggtttttccacattccttacattcaaagggtttcttgccagtatgaattttctgatgatgagtgagtcttgagggatgtctaaaggactttccacattccttacattcataaggcttctcaatggtatgaattatctcatgtgtagcaaactgtgagccatgtctaaaggttttcctatattctttagatgcacagaatttctttttactgttaatgatttgctgtaatgtgaaggatggatggtgactcaaagtgggcagatcttcatgagtgaataccaattgattgaaatgtcccccctgagagccgagttctttcttaaactgccgattacattcccaatcatctctgaaactggagcactgaaaatcacgtcttgtgagtttttccattatttcccactgggttgattctatttcataaatttctttcttcagaaataatttcttggtctcacatcttgattccaggactgaaagaaaatatgaaagtaatcactcacatttttcttgtttgggagaaacaaaacttcaatcaatatgggagaatttaaccgaattttttttacaaatggatgaggaaaaaagagagttagaagacaggttacataataagatgagggtagtgattaggaaaacaaagtaagtcactggttcccaaacattgctatagatcagaattactttgggaagcctgctaaatatacacatgctttagtcctatctcccttgttaaaggatgactctaatcatacacacacaaaatatctcattgcatatatacacacagacatataatagcatctcatagtatgaattataaaataagggaaatggccaggcatggtggctcacatctgtaatcccagcaccttgggcgggtgaggcaggcagatcacttggtcaggagtttgagatcagcctggctaacatggtgaaacctgtctctactaaaaatataaaaatctagtggggcatggtggtgtgtgcctgtaatcccagctactggggaggccgaggcacgagaattgcttgaacccgggaggcagaggttgcagtgagccgagattgccactgcactccagcctgggcaacagagtgagtcactgtctcaatagatagataaataaataaataaataaataaaggaatgatcacactgttaacagggctattgtcggatgaaatgaatatgcctaatggaaaattcccagagatcagtaaactatggcctatggccctgcacccatttttataaatgaagttttattagccatacttgttacgtattgtctatggatgcttttgcgctaaaagggcagaagtgagtagttatgatagagaatgtgtgaactgcaaacctaaaatacttactatttgcctttcaagaaaaagtttgccagcccctggttagatatgcatcgtctaatacagtagccgctagctacatgtggcttttaaaatttcaaataatttaagtaaaatgtgcatttcattttgaaataaacagctgaatttgaaaattcagtttctcagtcacattattcacatttccaatgttcaacagccaaatgtggctggtagcttttgtactggaagtctgtacgaaatatcacaaatataaaacatttccatcaccactgaatgttctcttggatagccctggtctggattctgtaacaggagggccagagcactttaaaaaatgataaggaactagagggtgacaatccagaaaaaagcctagcttaagaaaagtcaagtgtggaatgaacatagtatgagtggtagataggactcatttgtggacagatatggtatatgtttggggtttgatgaaaatagtgtttgtcgtgtaattctgagatgctgacctttgttaaagagaagaggggacttaacaagtacatgatcactatagtagtaatgactgactggcagaaaagacatttgtaggttcaagagaaggggagagagtaaaatggaaggcagtgtatggtactgacagatcagagatactagattcagttacatgcgttttatactcaaacttgaataattataagctttgttttcttgggcaaattagttcaaccttccaaacctgcagttctctgtctaatacaataggaatgatagcccttacaactgttgtgaggattgggattaatgtttgtaaatactatggaagaatttctgccaggcacagtggctcacgcctgtaatcccagcactctgcggggccgaggcgggccgatcacgaggtcaggagtttgagaccagcctgaccaacatggtgaaaccctatctctactaaaaatacaaaaattagccgggtgtggtagcacatgcactgtaatcccagctactcaggaggctgaggcagaagaattgcttgaacccaggaggtggagattgcagtgagccaagatcacaccactgcactccagcctagggaacagagcgagactccatctcaaaaaaaacaaacaaacaacaaaaaaaagaatttccatacaaaaatggggacattaggcccgaccccttgactcgttaaaaaaaaaaaagggagaatagttagaagacttgaaagtcactgactcttagacaaggaaatggaggggtaaggaaggtacagctttgtaaactattataatatacatgtaatacaaataaatttttacaagaaataatttggtctggttacagagggacaggatctcatctagtattcttatcagttacccatagagaaagaaatgactacggaatgagatatgatgaaaagaaaaaatgagtatagcaaggtggttgagaaaactgaaggctttagggttgtaaaagaggtctgaattccagactttttaactagctgagaggcataaccaaattatgaaacctcaatgaatattgtttttatcatctgtaaatctgtcaagtgtatgacactagtaggtactcaatattttagtggaatagtgttatgaattaagtagggaagatagtttgaaatcatactagatcatatggtaaaaacgtacatcatgcaatctttctctgatagctataaggcatttaatctgatcactgaatcctaaacaaacaaaagacgtgagaggaaatcaacactagatttaacttgtaagaaacatcaaaaagagttcttcaagtagaaagaaaaggacactaacaatataaaaatataaaactcactgtaaaggcaggaatatagttatattgagaacactctgataatgtaataatagtgtataaatcacttttaactctagtataaaagttagaagacaaggctgggcacggtggctcacacctgtaatcctagcactttgggaggccaaagcgggcagatcactaggtcaggagttcgagaccagcctgcccaatatggtgaaaccctgtctctactaaaaatataaaaattagctgggtatggtggcgtgtgcctgtaatcccagctactcagcagggtgaggcaggagaactgcttgaacccgggaggtggaggttgcagtgagctgaaatcttgccactgtactccagcctgggcaacagagcaagactctgtctcaaaaaaaaaacaaaaaaacaaaaaaacaaacaaaaaaaaagttaaaagacaaaggtactaaaaataaataaactggcggggcgctggtggctcacatgtgtaatctcaggactttgggaggccgaggtgtgcagatcacgaggtcaagagattgagaccatcctggccaacattgtgaaaccctgtctctactaaaaatacaaaagttagctggctgtggtggtgtacgcctgtactcccggctactcaggaggctgaggcaggagaatcacttgaacccaggaggcagaggttgcagtgagccgagatcgcgccactgcactccagcctgggtgacagtgtgagactctatctcaaataaataaataaataaataaataaataaataaattaattaattaaaataaaataaaaataaaaataaataaacctacaatcatttgctaatagatacacaatatataaaagatgtacattgtaacatcaataatgtaatgtgggtggagaagttaaagtgtagactttttgtatgtggtcaaagttaagctattattattattattactattattattatatttttgagaaacagggtcttgctctgtagcccaggccacagtcctcactgtagcctcaacctcctgggctcaagggatcctcctacctcaacctcctgagtagctgaaactagacatgtgccaccacacctggttaatctttttttgagacagattcttgctctgtctcccaggctggagtgcggtggcacaatctcggtttgctgcaacctctgcctcccaggttcaagtgattctcctgcctcagcctcccaagtagctgggattacaggcacctgccaccacacctggctaattttttgtatttttagtagagacaaagtttcatcatgttggccagactggtttccaactcctgacctcaagtgatccttaaacatttcggtagagacagggtctcactatgttgctcaggctggtctcaaactcctgggctcaagctatcctcccacctcagcctcccaaagtgctgggaatacaggtgtgagccaccatacccagcctaaagttaagttattattaacttacaatagactgttataactatgagatgttttaaatatgtaagccttatggtaaccacagagaaaaactctctagtagatacactgaagacaaagagaaagacatcaaatcataccaccataaaaaaatcaaatcaaaaagaaagagtgagataggaacaaagacactataaaacagtcaggattagctcggcagaggggtgcatgactatagccccagtaacttgagaggctgaggcaggaagattgcctgagcccaggagttcaaaactgcagtgagttatggtcatgccactatactctagcctgggcaatagagggagacctcatctttaaaacaacaacaacaacacaaaagaagaatcataagagactactatgaataattatatgccaacaaattggataaactaggaaaaaaatggataaattcctagaaacaaaactaccaaacctgaatcatgaagaaagagaaaatctgaacagaccaattatgagtaggatagttccatcagtaatcaaaaacctcccaacaaataaaagacaaagacttgatggcttcactagtaaattctatcaaacacttaaagaagaattaactccagttctcctcaaactcttccaaaatgttgaagacggaacacttccaaactcattttatgaggatagtattaccctgataccaaaaccagacaaaaaatctacaagaaaattacaggccaatatccctgatgaacacagatacaaaaatcctcaacaaaatactagcaaatggaattcaacagcacattaaaaggatcatgcaacatgatcaagtgagatttattcctaggatgcagggatgtttcaatataagcaaagcaatcaatgtgatacaccacatcctaaaaccatatgatcatttcagtagatataggaaagtcatcttacaaaattcaacatactttcataatcaaaactctctcaacaaattaggtgtacaaggaatttacttcaaaataataaaggccatatatgacaaacctatagctaacattatcctcaacattggaaagataaaggtttttcccctaagatcagaaacaagacaaggatgtccactcttgacactctgctcaacatagtaccaaaagtccttttcattccttttaggcaataaaaaggaataaaaggcatccaaattcaaaaaaaccctaggggatctaccataaaactgttagaagtaataaatgttatttatttgcaactcagtgtgctcccacctgtaattcccgcactttgggaggccgaggcgggcagattacttgaggtcaggagtttgagaccagccgggccaacatggcaacatcccgtctctactaaaaatacaaaaattagccgggcaatggtgggcacctgtaatcccagttactcaggaggctgaggcacgagaatcgcttgaacccaggagatggaggttgcagcgagccaagatcatgccactgcactccagcctgggtgacagagcgagactctgtctcaaaaaaaaagaagtaataaggcctcatgcagtggcttatgcctgtaatcccagcactttgggaggccaaggtgggcggatcatgatgtcaggagatcgagaccatcctggctaacacggtgaaacctctctctactaaaaatacaaaaaattagccaggcatggtggtgggcgcctatagtcccaactactagggagactgaggcaggagaatggcgtgaacccgggaggccgagcttgcagtgagccgagattgcaccactgcactccagactgggtgacagagcgagactccatctcaaaaaagaaaaaaaaaagtaataaatgtatgtgtattcagtaagatacaaaaatcggttgtttctatacactagcaacagattatcagaaaaagaaatcaagaagacaatcccatgtataataacatcaaaaagaataaaatacttaggaaaaaatttaacaaaggaaatctgtatatggaaaactataaaacactgatgaaaaaaatgaagacacgccaggcatggtggctcacgcctgtaatcatagcactttggaaggccgaggcaggtggattgcctgagctcaggagttcaagaccagcctgggtaacacagtgaagccccatctctactaaaatacaaaaaaaaaaaaaaaaaaaaaaattagccgggcgtggcagcatgcacctgtagtcccagatactcgggaggctgaggcagaagaattgcttgaacccgggaggcgtagattgcagtgagctgagatcacaccactgcactccagcatgagcaacagagtgagactccatctaaaaaaaaaaaattgcattaaataaaaaaggggggtggggagctaggggagggataggattagaagaaatacctaatgtagatgatggggtgatgggtgcagcaaaccaccatggcatgtgtatacctatgtaacaagcctgcacaatctgcacatgtatcccagaacttaaagtataataaaaaataaatgaagacaaaaataaatgaaaagatattctgcattcataaatgggaagaattaatattgttaaaatgtccatactacccaaagcaatctacacattcagtggaatccctaacaaaattccaaaggtattttcacacaaatagcaaaaacaatcctaaaattcatatggaaccataaaagaccctgaagagtcaaggtaatcttgaacaagaagaacaaagctggaggcatcactacatccgatagatttcaaaatagattacaaagctgcagtaatcaaaacagcacggcactggcataaaaatagacacatcaaccaatggaacagaatacagaaccaagaacccatacagaacccatgcatttatggtcattggattttcaataaagatgccaagaacacacaatggggaaaagacagttcaataaatggtgatgagaaactggatagccacatgcaaaagaatgaaattgaattcctattgcatacatatacgaaagtcaactcaaaatggattaaagacttaaacatgagacacaaaactaaaaacacagaaaagaaaagcaaaaaatagaaaaatatgattacatcaaactcaaaagcttctgcacagcaaaggaaacaacagagtgaagagactatccacagagtgggataaaatattttcaaaccttgtatctggtaagatgctaatatccaaaatgtataaggaactcaactcagtaacaagaaaacaaataacccaattaaaaaatgggcatttctcaaaagaagacatagaaacagccaataggtatatgaaaaaacactcaacattactaatcatcaggaaaatggaaattgaaaccacaatgaaatatcacctcattgctggttactgtggctcaggcctgtaatcccagcactttgggaggccgaggtgggtggatcacttgaggtcaggagttcgacaccagcctgaccaacatgatgaaatcccatctctactaaaatacaaaaattatgtgggcttagtggagggcacttgtaatctcagctacttgggaggctgaagtgggagaatcgcttgaaccccggaggcggaggttgcagtgagctgagattgcaccactgcactccagcctgggcaacaagagtgagactccgtctcaaaaaaataaacaaacaaacaaaaatcccctcacacctgtcagaactgctattatcaaaaggacaaaaaataacaagtgttggaaaggatgtggcaaaaagggaatccttggacactgttggtggcataaattgaaacagccattatggaaaacagcatggaggtttctcaaaactaccctataactcagcaagcttacttctgggtatatatccaaatgaaatcaaatcagtatgggggaaaaaaaatctgcattcttatgttcattgcagcatcattcatgatagccaagatatggaatcaatggataaattgataaagaaaatgtgatgtgtgggcatatatatgtatacacacacacatacacatatacacacacataatggaatgtgtgtgtatatatacaaatacacaaacactggaatattaagacttaaaaatgaagaaaatcctgttattttcaacaacatagatgaagctggaggacatatgtgaaataagccaggcacagaaagacagatactgcagtgatctcacttatatatgaactctaaaacgttgaactcatagaagaagagagtagaatggaggtcaccaggggttgggggacggaggaaagaagatattggtcaaagggtacaaagttctagttactcagaataaaaaatttctggagatctaatatacagcattatatattaatagtatgtactgccatgtaagtacataccattaatggtaataccagtacagaacgtataccatagtaactatagtttataatactgtattgtatacttggaatttattatgggagtagatcttaatgttcttaccacatacacacatatacaaattggtaactatgtgatgtgatagatacattaattggcttgattatggtaatcatttcacaatgtatacacatatatcaaaatacctaactgtatactgtaaatacatataatttttctttttgagacaaagttttcactcttgtcgcccaggctggagtgcaatggcgcgatcttggctcactgcaacctctgcctcttaggtttaagtgcttctcttgcctcagcctcccaggtagctgggattacaggcatgcaccaccacgcctggccaatatatataatttttatttgccaaatatacctcaataaagctagggaaaaagctggaatgaattgtttaaaaaactttcagagaaggatgaaagtgatgacagaaaataataagtcatagggaagaaaaattgatgtaagaaataaaatgaatgtcaaatatgaattctggaaggaaaatatggcaatgatatagaaccctaataaaacaaatttccagggttgatgaaaactcttagtattcagatggttccctttttgctgagcaatatatatgaggaaagaggtttttgttttgttttgtgtttgcctcagcctcccaagtaactgggattacaggcatgagacaccatgcctggctaatttttgtatttttagtagagatggggtttcatca[139 bp omitted]gactggagtgcaatggcttgatctcggctcaccacaacctctgccttccaggttcaagcgattctcctgcctcagcctcctgagtagctgggattacaggcatgcgccaccacgcccggctaattttttgtatttttagtaaagacggggtttcaccatgttggccaggctggtctcgaaccccaacctcaggtgatccacccgcctcggcctcccaaagtgctgggattacagtcgtgagccaccgcgcctggccacctattactttttttttttttttttgagacagaaccttgctctgttgcccaggtgagagtacagtggcgtgatctcagctcactgcaacttccacctcctgggttcaagagatcctcctgcctctcagcctcccaagtagctgagatcatacgcagctattttttttgtatttttagtaaagacgaggtttcaacacgttggccaggctgatctcgaactcctgacctcaagtgatctgcccaccttgacctcccaaagtgctgggattacaggcataagccactgtgcctggctttcataggatttaaagaaagacctagggtctcatagaataatattcagaatgccttaggataccatccaaaatcactcaacatatgaagaatgaagaaaattttaacttacatggcaaaagacaacagacaccaaaataaaggtgactcatgttggaattatcagataatgactttaaagcagctattttaaaaatgcttgaataaggaatcatgcacactctgcaaaccaatataaaaatagaaagtttcagcaaaagaatagaatatataaagaagaataaacaagttttagaactgaaaagtgcagtagccgaaataaaaaccactggctaggctcaacagcagaatggaggtaataaagtcaataaacttgaagatagttcaaaagaaattagctaatatgaatagcagcgaaaaaaagatggaaaatgcaaaaagaacatagcctctgggaatgtagaacaagaaaagatttaacatttgtgtcatcagggtttcagaaggagaagagatagtataggactcaaaaaagatttgaagaaataatggctgaaaacttacaaattttgtgaaagataaaacaagcaaagccattttgagaagctcagccaccccaaataggataaacccaaagaaatccatactcagacacatcataatcaaactgctgaaaatcaaagacaaaataaatagtgaaagaactgtaaaaaaatatatattacttctgggtgaacaatgatttgaatgactggattgctcttcataaactctggaggccagaaaaaaattggaacaataatttattgtgctgaaaaaaagagttgtgaatccagaattttgtatctaccaaaaatatccttcagtaatgaaggtgagattaagaaaagtaatactgcaaatgtacattgcagctcaggctgtgccctcagagtctgtgtgagagtaggcaatagtggggacagtggttagtaaaagagcttgtaccccttctcaaaggggttaagtgcttgttaaatccaggagacagctgtcatgtgagaatgaaggtccagtgctgctttccagctctccaaggaaaactagaaatccagatttctatattaaatcccctgatagcttgaggctggtaactaattcagaacattagagaactgtaggggcagcaccaaacacaaacatgtgtaggatacaccctgagttactaggttgttacttcaatggagttttctgtttctttgaacttcagaaattataccaagatacatctaattaaaactcttggctggacgcagtggcttacgcctgtgatcccagcactttgggagtccgaggcaggtggatcacctgaggtcaagagtttgagacctggccaacacggtaaaacctcatctctactaaaaatacaaaaaaaattagttaggcttagtggcgtgcacctgtagtcccagctactcagggaggctgaggcaggagaatcccctgaacccaggaggcagaggttgcagtgagccaagatcacgccactgcactccagcctgggcgacagagcgagactctgtctcagaaaaaataaaataaaataaaataaaaaaataaaataaatcctatggagatggttcatattttgttttaacaggtattgaccatgttgggtacaggctgcaagttccaacaaggcttgtgtggactgtgattccagtgtcagttttcaaggcctttgcagtgttatttggatttgtcctgtgtgtacaccacccaatccaatctgaacttacactttagttcttaaagtctttgatatgttatttagggacagatccacatatattcgggcaaaaatgagcctaagagttcataaaaactgagttttttgaactttgggtttttttttttttttggagatggagtttactcttgttgcccaggttggagtgcaatggcatgatctcggctcaccccaacctctgcctcccgggttcaagcaattctcctgcctcagcctcccgagtagctgggattagaggcatgcaccaccacgcttggctaattttgtatttttagtagagatggggtttctccatgttggtcaggctggtcttgaactcccgacttcaggtgatccacccacctcggcctcccaaagtgctgggattacagacatgagccaccatgccggggccaactttgggttttttgaacttgaacataggttgcttttttgaacttgttcctttctgggatcttcttaatactttctagttccctggagctcccctattcagttctctagtcctaacgctggggctttagttacctccctctgctatgtattttctgcaactatgcctgggtatggcaggaggaaacagagaaaaaaagtaataggggttcactccacggcaactctaacaggaaaagaaggttcctattccttgtagttttagatacctgcaggcccccactgcttccactattgctgctgctgctgtgagattgtctggaggctgggacatgcaaaaacaggggggaaaatatagacatatatttgtgtatatatacatatatgtatatatgtacatatgtatgtgcatatacacacaagcaagagattgccccaatctctcttggtgttaagaatcccatttcctcccatcctggctaacgcggtgaaaccccgcctctactaaaaatacaaaaaattagccaggcgtggtggggggtgcctgtaatccaagctactcgagaggctgaggtaggagcatcgcttgaacccaggaggcggaggttgcagtgagccgagactgtgccactgcactccagcctgggtgacacagcgagactctgtctcaaaaaaaaaaaaaaaaaaaaaaaaaaaaaaaaaatcccatttcctgtgccttctgccaaaactggaaggcttatcttgggccagacgcagtaatcccagcactttgggaggccaagatgggaggactgcttgagcccaggagttcaaaatcagcctagataacacagggagacctggtttctaccaaaattttaaaaattagctgggcacggtggcacatgtctgcggtttcagctactcgggggctgaggtaggaggattgcttgagcccaggaggtccagactgcagtgagctgtgggttcaccactacactccagctggaattatctctgtctacatcctacgcaataaacaactcaactgcatttgtagacccccaaaaatatatagaaaatacctagaaataaaatatcaaatgaactataagcccttttttgagataagtttataaaaatacactgaaataccatcaagaaggcctaaataaatggagaaaagtactgtggtcatggcaaacatgatttaacgtaataaagatatcagttactactaaagtgatctacaaattcaatgtaatttctttttttttttttttttttttttgaggcagagtctcgctctgttgcccaggctatagtacagtagtaccatcttggctcactgcaacctctgcctcctgggttcaagtgatgctcatgcctcggactcccaagtagctgggacaacaggtgtgcgccaccacacctggctaatttttgtgtttgctttttttgggtttttttttttgagacagagtctcactccatcacccaggctggagtgcagtggcacgatctcggttcactgcaacctccacctcccgggttcaagcaattcttgtgcctcagcctcccgagtagctgggattacagttgtgtgctatcacacctggctagtttttgtatttttagtagagcctgggtttcaccacgttgtccaggctggtctcgaactcctggcctcaagtgatctgcccacctcggcctcccaaagtgttgggattacaggtatgagccaccacacccggccaaattcgatgtaattatacatattaaaaactcaacattttaaataaaacataaagtaatttttaatactatatgaaagatcaaagagataagtataaccaaaatatgcctaaagaaaaggtggagagatgtgtcctatcagaaatcaagacttgttatataaacaagagtaattaaggcagggataaaaaggctcaatgtaacaagaaagacccaatgcatatatgaaatctgaatatatgacagaggagcattgttgatcaatgaagaatagacggagttttcatttgagagggaaacataattttttttttaagagacggtgtttccctctgttgcccaggctggttttgaattcctgggctcaagcaaccctcctgccttaacttcccaaagtgctgggattataggcatgagctaccacacccagccaattcgttttctatataggaaaaataactgatctccatctcatactattcataaaaatcaattaaagttgcattaataggtctttaataagaaagcggaaacataaaaattcttgggagttcgagatcagcatgggcaacatggcaaaaccctgtctctacaaaaaatatgaaaagttagccgggagtgatggcatgcgcctgcagtcctgggaggctgaggtgggaggatcacctgagcctaggaggtagaagctgcagtgagccgtgattgttccagtgcactctagcctgggtgactttttctgtcttaaaaaaaaaattttgggaatcaaagtagaaaattgggctaggaaggggtttctgaagatccaaaaagtataaagcatacaggaaaaagataaaaatgtttataagcaatatataatttaaccactaaacatacaatttgacaatattaacacaaagaattactgttcttcaaaagatatcataacgaaagtgaataaaaaagacacaaactggaaaacatatctataaaacatgcgattgatcaaaaatgagtatctagaatttatacaaggaattcctacaaatcttaggaaaaagacaaattagcctaatacaaaatggatcaaaatgacattatacagaagagacactaatgaccaataaacatatggaaaggtaatcatcttcaaaaatgaccagggaaatttaatttaaaattataaaataagagttcatactcaccaatcagattattaaaagatgaaaaaataatatcataaggaaagatggtggaacaaaagtacttccaacgtaaactaatacaacacttggaaaacagtttggcatcaccttgcaaagctgagtaagtacgtacaccaagatcctgcaatggtattcctaagtgtatttcctaacaaatctcttgcacatgtctaagtctgcagatgtaaatattattgtcataattacatgtttacatatatacattctatatattctactatgtttataaatacttttttttttgagacggagtcttgctctgtagcccaggagtgcggtggcacgatctcaactcactgtaagctccgcctcccaggttcatgtcattctcctgcctcagcctcccgagtacctgggactacaggtgcccgccaccatgcccggccaattttttttgtatttttagtagagacggggtttcatcatgttagccaggatggtctcgatctcctgaccgcgtgatccacccacctcggcctcccaaagtgctgggattacaggtgttagccaccatgcccagcttataaatactattttaagggaaaaatttaatggataggttgaaaagcataaaggtcattgttacagaatatattagcaaatcaatataaatcaaggccaaagaaatatatatattaaatatatataaaggcagtataaatatatataaaggcagtataaatggaaaaacagataaagagtaagaaacacacagacgttttatgtcagtttaatagaaggaaaaaaggaaaaggtaacaaggcaatatttgaagagatgactactaagaatttcctatcactgaaaaaaaaaagatgtaagtcctcagattgaaaaatactaccaggagcaaggcataaggggaataaaggtaaccatatctgaatttatcacagtaaaaatttagcctattagaggaaaacatttttctctaatggaaaggaacaagaatcatctatcaaaaagaaaacagttaagaatatcttcatggccttgtggcaggcaaagatatattaaaaaagacaacaatgtacagctgtccctctgtaccaggtgggaggggtgaggacagttgaggtttggtttcaggaccatggcagacacaatctgcggatgctcaagtcccttatataaaatggcacagtaagttggtttcaaccaactgtgagtctcaacctactaatacagagggccaactatacgtattttacatccatgattggttgagtctgtggatgcagaatccacaaatacgaagggctgactatacatatgtgatgattccattcatgtaagattcaaatataggctaaggaagaatttcttaactgagtccctacgagtgtgaagcataaaagaaaagatggatacatttgactacagtaatcattaagaacttctgctcacagaaaagaaaaccgtaaacagagctaaattcaattcagagtagaaaaagatacttgtagtttgtagaacatgcaaagtcccataagcagaacatataaagaactcttacacattaagaaaaatacagacaattcggccaggcgcagtggctcatgcctataatcccagcactttgccgaggcaggtggatcacaaggtcaggagatcgagaccatcctggctaacacggtgaaaccccatctctactaaaaatacaaaaaaattagccgggcgaggtggcaggtgcctgtagtcccagctatttgggaggctgaggtaggagaatggtgtgaacccgggaggtggagcttgcagtgagccgagatggcgccgctgcactccaccctgggtgacagagcgagactccgtcaaaaaaaaaaaaaaagaaagaaaaatacagacaattcaacagaaaaa[137 bp omitted]cagtgaaaccccatctctactaaaaatataaaaaattagatgggcatagtggtgggtgcccataatcccagctacacaggaggctgaggcagaagaaccacttgaacctgagaggcagaggttgaagtgagcgaagatcgcaccgctgcactccagcctgggcaacaatgtgaggctctgtctcaaaaaaaaaaaaaaaaaaagaatttcaaaaaaccaatgacttgaaaatgtgtgctaaaactcatcaggaaagaaaaatgtggccgggcacggtggctcaagactataatcccagcactttgggaggcgggtgggtcatttgaggtcagcagttgaagaccagcctggccaacatggtgaaaccccatctctacaaaaaatataaaaattagctgggcttggtggcacgtgcttgtaattccaggtacttgggaggctgaggtgggagaattgcttgaacctggaaggcagaggttgcagtgagctgagatcatgccactgcactccagcctgggtgacagagcgagactccatctcaaaaaaaaaaaaaaaaaaaaaaaaaaaaaaaaaagaaaaaaagaaggaaatgcaaattaaaaccacactgaat[137 bp omitted]cagggagaaaccccatctctactaaaaatacaaaattagccgggcgtggtggcgcatgcctgtaatcccagctacttcggaggctgaggcagaagaatcacttgaacccgggaggcagaggttgcggtgagccgagatcgtgtcattgcactccagcctgggcaacaagagtgaaactctgcctcaaaaaaaaaaaaaaaaaaaattaaagtttgacaataccgtacattaggaagcatgtgcaacaatgggaacattcatatactgctggtgaaattgtaaacaaatacaagtgttgaagaaaagttaaaattaggtagctcggctgggtgaagtggcttgctcctgtaatcccaacactttgggaggttgaggtgggaggatcacttgaggccaggagttagagatcagcctggtcaacatggcaaaaccctgtctctactaaaaatacaaaaattagctgggtgtggtgctgcatgcctgtaattctcacaattcgggaggctaaggcatgagaatcacttgaatcttggaggcagaagttgcagtgaacccagatcacgccatttcactccagcctgggcgacaggactagactctgtctcaaaaaaactaaaaaattaggcagctagtttgggagcagtagctcatgcctgtaatctcagcccttctggagcctgagtggtgggatcacttgagcccaggagttccagaccagcctgggcaacgtggcaaaaccccgtctctacaaaaaatacaaaaaattaaccaggtgtggtggcatgcatctgtagtcccatctactcaggaggctgaggtggggggatcacgtgagcccaggaagtggtcaagactgcagtgagccgtgatagtgccactgccctccagcctgggcaagagtgggaccctgtttcaaaaaaaaaagtaaaagcaccctctgggaaccaatagacaggtaaatgttattattttgcaaagtccataaaaactgaaaaaatcaacacagtaatagattaaaagtatgaaatatagaaatgaacaaggtaattatcatgctatggtgaaaatgtacactcttacaagtattcaatataatgacaataaagcagtccagtatacaaagaaatcactgtaaaatttatataactttgcattaaggttatataagggagaaagtatcagtattttttagaattacatgagattatgcaagggtgaaatgacatgaagtcctggatttacttgaaattatttgtggtgggacgcggtggcttacgcctgcaatcccagaatttgggaggccaaggcaagtggatcacctgaggtcaggagttcgagaccagcctggccaacctggtgaaaccccatctctatgaaaaatacaaaaaaatttgccaggcatggtggcgggtgcctgtaatcccacctactcgggaggctgaggcaggagaattgcttgaacccgggaggtggaggttgcagtgagccgagatcacgcctttacactccagcctgggtaacaagagcgaaactccatctcgaaaacaaagaaaaaaaagaaaatatttgtgcgacaataggggtagattagtggcatgtatttttgaaaattttcacaatgaaaagcaacattctacgacttgtaaaataaatgagcgaaaacatttatttaaaataaaaattaaccattcttaaagagtacaatgaaatgaatactaccaaacactgtgagtgtctgaaagcttcagaaatatcttgtctctgagaatctatcctaagcaaatacagaaaaatctatatgcgtaaagtgtgcttttacataaagaatgcatatatgcataaagaatggtacttttacaaacaagcattgattagaaagcagcttaactatgtaagtataagtactcgaactgcactaaaagaaaaaaaaaacagaattatatgagaaaatgcatgtagaaactattacatacctatctaatcttcatggccagatctttttggtacttttcttcctgagttcctgagttcaccttctatcctgctgttgttcaacctacatttccttgccataccttctcctgctgtaaacctctaggtatcagggtgcttcaggtttctgtccttgctatatttattccctaggggatttcatccagtcacaagactctatatctctacattgaaggctctccaaattttcctccaatgctgatctgacctcccagttccagacttctatactgagctgcctgcatggcatctatgctgcgtccagtaagccctgaagcttaacataagcaaacccacccttgattttgcaagccccaaatctactttccccatttcagtaattacaaagcccattcttccacaggctctccctaaaaagcatgaatccttttttttccgcttacactccaagactgaatcctgctaactcttccttgaaaagatttcaaacccaccgcttccttccactgccactgataacatttcaatggtctctgagccatcactgtatctcaaccagactactacaaaaacctgctaaacagccactctgcttccaatcttgccacctacaaagcagccagggaaatctttttaaaatatatgttgcatcaaggacaggcgcagtggctcacacctgttatcccagcacgttgggaggccgaggtgggaggatcacctgaggtcaggatttcgagaccagcctggccaacatggtgaaacactgtctctactaaaatacaaaaattagctgggcatggtggcgggtgcctgtaatcccagctactcgggaggatgaggcacgagaatcgcttgaacccaggaggtggagcttgcagtgagccaagatcatgccactgcactccagcctgg[137 bp omitted]tggtgaaaccctgtctctactgaaaaaaaaatacaaaaaaattagccgggcatggtggcacgcacctgtaatcccaactactcgggaggctgaggcaggagaatcgcttgaacctgggaagcggaggttgcagtgagccgagatcatgccactgcactccagcttgggcgacagagcgagactctgtctcaaaaaaaaaaaaaaaaaaataatgagttgcatcaagccatttctaggtgcacagccttctgatgacttcttgtcttagaatgaaaagatttcccatggcctgtatggcagacagtacataaactgacccactctttcccactcctgcctctttgatctcatctcccacccacgtacccctctgctctcactcctccagtcactggcctctggggctgctcctcaaacacagccaacgcacagctgcctcaggcccttgaaggtctgcattcctccatctggagtggtcctccgcccagtacagtaacttactatggtgcttcttcaggtctctgcccaaacgttaccatatcatttagtaagatatggtaaatttctcttgccccttcacataaaatatcatcctttatccccttcctctacttcttatttcttttagtatttactattacctggtatgttatatattcatctattttcatgtctctccctacactgtggggtaggttctgggaacagagattatgcatgttcttttttttctttttttgagagagtctctctctgtcactcaggctggagtgcagtggcgtaatcttggctcactgcaacctccacctcctgggtacaagtgattctcctgcctcagcctcctgagtagctgggattacaggcgcatgctaccacacccagctgatttttgtattttttagtagagatggggtttcatcatgttggccaggctggtcttgaactcctgatctcaggcaatcctcctgcttcagcctcccaaagtgctgggattacaggggtgagccactgcacccaatcacgcatgttctattcattactgtaacctcagtgttgagaatagtgctgggcataccatagtcactacagagacataaactaaatgaatgaatgtgctgttctgttcctcctccttcataccaaatctctctttgccagctcttaccttctccatggagacacaggccctttatttccaaccctctatataaagtcaatgatgcttacaccaaaaatctccccctatgacttctatgtggatcaacccctcttctacctcgttagccctcactttctgctaagctccctattttaacttcgcttatggtggtgttatttgtagacatgttctagtacttctactaggcagtaagttctgaaattgcttattccttttttaaactctgcagcacctagctgagtgccttatacatgttagaaaatcagtaaatgttggtaaaaaatatgaatgaatcaatgagggcataaacccctatcccaaaaaacttagtaaaagcaaataagtctttggcagtgtaggaaaaaatctatttctggagacagtgatgcttttattagactaaatacaaaggaggatgagaagctaggaaggaaatggatccaaaatatggatagaaaagaatatcactagaaagggtggaggagggcaccagctggttagaactgagagagaaggataagaggagaaaagcaggcaaagtgtgttaggtaaaggggaaaggtaggatcatttgaaagctcatgtagaaaaggtcttacatttgcacaacaggccaaaagcctgtgaggagagtttcccagatagcatctaaaagatgcagtctctctaccagccaaatcacgcattacctgctgtgcctcacttacctggccactggcctcttgttagctctctgtcagccaaccagggctccttcccttgctccaagtaggagatcacatttggtttagaaatagaatgccctgcttacaaaagaagtaacaaaacaaatttatcatgagcatatcctagaattcaaatccagtcccttcattataaagaaagacatggcattatgagaagagtcaaagagaggtacaacggacttatgaaacataacggaagatgtaaaacatccccaaaaactcaatgcagcttcctttttctaactctaccatattcagaacattcctgtggaacaggatatcaaaattcgactggtttttgaaagccaggtgagcatttcacattggaggaagtaggccttccaagggcagaatctaaattactatggacagatgtccttacccattgaaaccaggttgctgtaattctccaacatcacatctctgtataaatctctctgatcatcattcaggcattcccactcctcctgagagaagtctacggacacatcactgaacatcactgactcctggaacaataaccacgtatatgacttcattaattttttaaaaagtacttttgtgaaggaaagagagaagaaaaagattaaggtagaggaagtaaaatatagtgagcatatgaatgtctgggaagcagtggaggactgtaaacaaataagcacaactgaatcactgggtttccaggtcattctgtttcctccaaatgaaactgcctgagtatgctaggatacctccattatccaaacaaggttgggaaggtacaaaaattcagctaagagggcttttccaattaaatgaaattgtatatgcaatgcctcacactatacctgtcatataataaatcaacgatacatgtgatctttctccctctcttttcccaaatagctgagagtcaaatttcagaataagggataaagacattaaaagccaccagagagaagagcaggtcatataaaaggcatcaaaaattagaggggcaatggaattctcaagaacacctctaaaagcaagaaacaataagaacgattcttcaatattctgatggagaaaataaactctgacctagactttcataaacaaactatcattctgttttgagtgttgagaaaagacatttgtagacatccaaggactcaagaagagtttcttcagaaacttctagaggatgtggtccacaaaaacgagggagtaaacaaaaaaagaagacaacataggattcaggaagtaggtaaagtttcaggaaagctgtgactgagagagtaaaccagaccagatgggaacaaggaaacaggaaatggggaatcaagtctctatatcaaaaggaactgatgtgtctgaccagagggaaaacgtattgattggcctgtggcaatgatgctggagattctggatataaacacacaaatgactaggcaaatgaggggggaagcaattaaccccaggaaaatgaagggttgtatagaacaaagccatgagctcgcttggcagagaataatatttgcagccgtaataaggtgtatactattgatttaaccaaaaatggtgatatggtaacagtcaggaaaaacgaaagtgcagtatgggaatacaatgttccctttaactttgcaatcagtcaagagataatgactaaagtgggtttatcgaaaaatggtagtaaaccaattttcaagagttgagggcagtggcctcttggagtgggtctggtaacgggacaaaaccagaattgaactatttcccttgtagacatgtgtaaaattacttttaaaaactttgtatcttagaaaattaaatttgcatataatttaagactctgatccattcctatgccagactattatataataagaaatattccttgttacaacaaatgctattcatatgtttctcactgaatactattctattataaggctataaatgacatctatccttttgcctttagaaattcaggctagaggtgatctctaaagacctcgccaacattggcccaatcttatttataaccacctactgcccagctgtaaattccccttataactaagctacagaaaactggtgaaggatgatccagtttcaccgttggtattactgacatcattgcttttgttttttaaacaggatcttcctctatcacccaggccaaagtgcagtggcatgatcacatctcactgcagccatgacttcctgggctcaagtgatcctcccacctcagcctcccgagtagctgggactacaggcgtgcaccaacatgcctggctaatttttgtattttttgtagagatggggtttgccatgttgcccaggctagtcacctgggttcaagcaaaccaccagcctcaacctcccaaaatgctggaattacaggtgtgagtcaccacgtttggccactgacatcaatttttcatggatgcttagtgaggtgtgagagctttgtaacaaccactagtcacactctcaaacataaaaggctcgttaaccaggagaccttgccatgtactaggactgaaatcaaacaaaaccacagcatgtattttcttattggaaaacccaggtctacagagctaatgagggcttttccctataaggtgcccctaattacttattttcatcccatcaaatcactgtccaagcaaattaaattcatattaattcaatgtggggaacacatttctgccctatcaggatttttggtagaaatctgagataggagatgctgaaggacttgtaaaccagcatgtaaacattgtttaaaagcggggggcggcggggaactgaagaggagactggggttgtttaggaggaaatgcatgtccttttcctgacaggggaccctggaaaccagtgtaaaaaaaattattccaaacctgatctgggtcaggtttttacattacataatttttacattacataattcttaaatctctttatggaaagaaagaaataagtattcttgatgaaactgataggggattttctgatggacattaatctaaattaaaacttcttcagagaaatttgttattcaaccacttggctgactaacagttaacagtgaattaatataaatttttttctgggcacagtggctcatgcttataatcccagctctttgggaggctgaggcgggtggataacttgaggtcaggaattcgaggccagcctggacaacatggcaaaaactcatctctactaaaaatacaaaaattagctgggtgtggttgtgggcgcctgtaatcccagctactcaggaggctgaagtaggagaatcacttgaaccctggaggcagaggttgcagtaagccaagattgtgccactgtactccagcctagaagacagagcgagactccatctcgaaaaaaaaaaaaaaagggtaaattttctaacaatgattatgtaatcaattctttttttttctatgaattggcctgttagagatcctttcctttacagcaaaattctgacattgctcataaccaaactttttgaaaggtgttgtttttctaacatcaaaaagcatcatcatgaggaaagcaaatgtttacagttactagaagtaaaaatcactctatctgagcaaaaggaaacagtatctcacctgagccatggctctgatatttgtagaaaaggaccttctcttggctcttcttttggagaagggtagagctgggagaggcaaaagaagatagataagaccccactttcctcacagctcctggcccagaatgatcattttccttctgttcatgcttcagaaatgcttgtggggtatcagtgaggagaatgggcaaatgtctctatcatccctagcttcaaagataccaggctgtaactggagcaggatggattagggcaactcaatatggcttggagaatatatgtttatatacacacacatacatacatatagatttttttaactcatattatacacactacttatacacgttgctatttttactttacatatcttggaatgaagtcccaattagcacatattgtgttacataactggtttaatagctacattgcagtccattaaatggatataacttaattttttttttcttttctttttgagacagagtctcactctgtcccccaggctggagtgcagtggtgcaatcttggctcactgcaacctccgcgtcctgggttcaagcgattcttctgcctcagcctcccaagtagctgggactacaggcatgtgccaccacgcccggctaattttttgtatttttagtagtgatggggtttcactctgttagccaggatggtctcgatctcctgacctcatgatccgcccgactccacctcccaatgtgctaagattacaggtatgagccaccgcgcctggccataactttatttatttaaccaatctgtggccaatcatcatttaggctttttctagtttttcactgtaacaaacaatgctgtaataaatatccttgtgcatatgtcattttacctgtatatgagttcttcacaattaattcctaaaagtataattgctcagagattatacacattttaagtttggatatacctgggtcaaaccagttttctgtttctgttttttttttgtttgtttgtttgtttttttgagacggagtcttgctctgtcgcccaggctggagtgcaatggcgcgatcttggctcactgcaagctccgcctcccaggttcacgccattctcctgcctcagcctcctaagtagctgggactacaggctcccgccaccacgcccgcctaatttttgtatttttagtagagacgggtttcaccatgttggccaggctggtctcaaaatcctgaccttccaaagtgctgggattataagcgtgagacaccacacccagccttgtgtgtattctttataaacatcttcactttaagatgtttaaagtgcccaaaagaataagttatactaaaatactaaaggaagactacattgtttaaggggaagaactgaattagtgatcaatgtttaaatgtttaagaaaattttggtgttttgcttattagctacaagaacttaataaacttaaaattatacaaactataaagagcactattattctctatgcaccaagcttcttgatcattaaacaattcatcaattatttcatataaaactgaccacccagaaagtagcaccatgttatcaattatctaatggcttcctctacccataggcactcactcactgcatttccccagatgaataccaaaggaatacaagtgtctcttctttaaaacctaaatgcacgctgatattattattattactactacatattaagctcttagtattcttttatcaaccaaatagcctatgatatataatagccaggcattgtgctagatactaaagagtcaaaaataatccagaaagatctggaaacagagttccttcttctatattcctcattttaagccctcctttctggtctctcctcctggccttcctctggttaaagggatgtcttcaaatgctgtaccttccaagcaggatggcatgaaacattcccacttcaacagctccataccatgcttgttgcattctcaacactcctcatctttgccccagagggcagcctcccatgctgaattcttacatcaggggatctgctcctctcttttaaattcagccctcattaatgtaaaaaaaaaaaaaaaaaagtctcacgaaataagaaagaaaactttctcaacttgatgagtagcatctaagaaatacctactgttgggagagacagttaccatgggtctccacattcttaggcgtcttgctgggtatgcctagaatgcaagattctaactactcatttcccagggttatttatgcagctgataaccttgagagttgagataagagcacgaacagtagggttgcttactgctgactataaaagcaatggattatccaggctcagtgttcctcagtggctatgcccatgcactgcatgaatagcatccatgtagacccacatgctgtccccatgggagctgagagaaataggaactgatgaacactgatgcctacgctgcttgctgtgccatgagtaataaagtctttgtctctgatccaggggtctcatgttttctgccagcattcatgaaactaacaggctaatgtatgagcttgtatgtaggaaaatatcaaatcctagagctaatgttataactaatgttgaaacactgaaaaatgtccccctgaatccaggaaaaaaagaataatgtgcattatcatcatttctttttaacaatgtaataaagggcttggccagtataatagggcacgatgaagaaataaaaggtataaagattggtaggaaagaaagaaaactatcattattcacagatgataagttgcagacatagaaaatcctaaataataaattcttaaaattagcaagtgaattaaacaacatggtctcatatagagacaatatataaaaatcaattgcatttctagtaacaagtaattggaaaattgtttaaaatgtaaatactattcacagtttccataataaacatcaaatactcaggtataaagctatcaaaaatgttactaaaaatgacaaattggtaagagaaattaaggatcttaacaaatgtcgacatataccatatgtactatagattgaatattgatgtcaattctcccaaaatgaacacagtttttgtttttgtttttgaatcagggtcttgctttgttacccaggtcggagtgccgtggcacgatcaaagctcgctgtagcctcaacctgtggggctcaagggattctcccaccccagcctcctgagaagcgaggagtagaagcacgccatcaagtccagctaaatgtttggggttttgtttctttgtttgtttgcgtgtttgcttggttttagttgtttttttgtttttgtttttgttttggtagagacagggtctcactgtgttgcccaggcttgtcttaaactcttgggctcaagcaatcctccagccttggactcccaaagtgctgggattacaggtgtgagccactgcatcaggccccaaaatgaacacatatatttgtaaagaaaaccccagcaaggctttggggggaataaggtaaaaattagcaagttgattctaacatttatttggaaattagaagagcttataatagccgagatagcttggaaaagaaaaaaagtaggaggactaaaactacagatttcaagacagcagtacagacaaaacaataaaaccaaatagaatatagagtccagaaagagagccacataaccacatgtatatactgtcacctgatttatgacaaagactccatgcaatttttttttcttttttttttttttgagacagagtctcactctgtcacgcaggctggagtgcagtggcaagatcttggtttactgtaacctctgcctcccaggttcaagcaattctcctgcctcagcctctggagtagctgggattacaggtggctgccaccacacccggctaatttttgtatttttagtggagacagggtttcaccatg[137 bp omitted]acagtgctgaaacaactaggcacccaactggaaaaaaaaaaattaacctttaccccatacataagaattaatttaagagggatcacagacttaagtgtgaatgtgaatgtttaaaagcttcggggccaggcgtggtggcttatgcctgtaatcccagcactttgggaggccaaggcccaccaaggcaggcggaacacctgaggtcaggagttcgagaccagcctggccaacatgttgaaatgctgtctctactaaaaatacaaaaaaaattagccgggcatggtggcagacgcctgtaatcccagctactcaggaggctgaggcaggaaaatcgcttgaacccaggagacagaggttgcagtaagctgagatcacaccactgaactccggcctgggcaacaagagtgagacttcgtttcaaaaaaaagcactagtcataaaagacaaagtactaaataaatatctgctacaaaaatggggaaagacataaacaggcaatcttttaaaagactctgaaatgttcaaacacactcataatgagagaaataagaaaacaacaatgagggctgggcacaggggctcatacctgtaatctcagcactttgggaggccgagtctggtggatcacctgaggtcaggaatttgggaccagcctggccaacatggtggaaccccatctctaccaaaaatacaaaaattagctgggcgtggcggcacgcgcctgtagtcccagctactcaggaggctgaggcaggagaatcacttgaacccaggaggcggaggttgcagtgagccgagatcgcgccactgcactccagccccggcaacagagcaagacactgtctcgggaaaaaaaaaaaaaaaaaaaaaagaaaagaacactgaggtactatttctcatctattagactggtgaaaactaaaaaacatgacaacatattctgttaggtgggctgtgaagggaaacagacatgctcatacacagcaagtaggaataaaaactggtacaacagttctagagaggaattttgcaatacttaacaaaactacaaagcacttaccttttgacccagcaataccgcttctaggaatctaccctaaagatactcctccagcaatagaaaaatacatatatacaaggttattgcagcactgtttctagtaacaaaatattgtaaatgacctaaatatccatacgtaggaaagcggttcaataaactatgataaatccacaggctgcagtattatgtaacaattagaaaagaattatgaatatctctttaactgcctgagtgttatccagaatgtatcattaagagaaagaaacaatgtacaaaagagtgcctagagaatgctatctttaatgtaaaaagaatataggtaactcttcatttgtgcaaaagaaacacagcaaggataaagcagaaacgaatgaagttgaatatatacaaggagtctgtgggaactaagttaatttttatttatttatttatttattttgagacggagtctcgctctgtcgcccaggctggagtgcagtggcgcgatctcggctcactgcaagctccgcctcccaggttcacgccattctcctgcctcagcctctccagtagctgggactacaggcgcccgccaccac[133 bp omitted]tcccctgcgaatgttttcacattcaaaatagtgtagcctgctacaatcaaccaggatgtgggggaacccaaaatgcaacaaatgatccttaaatgtaagaaaaatgtaagaaaaaaaaaaaacatactgaaaagagtggcaaagaaaagaactaaattgagtaactttggaagatgtttgtttactatatactataagcttaaagaaaaagagctacacagagattctctactgtagttactaaatactttttacacaggtccaggttggcaactctgaactaatttgcatgtattctaggatagagctaattattgattctgagaagcaggtttctctctgttggaaaatgaagtaacaaggaaatggccaaatttgatgggagacaattctccatgggtcttgcatgtttctgcgtatcttgcaagaagaggtactaagtgtttttgttctgcactattttaccaagttgtttatacagtgaacagccttggaagacagagtcggtctccttctacagcaaagggtaggcattctaactatccattataaaaaattcaggtttcctaaggtcaagggaacacacagatacctgtgtattttgcataatcctgggtgtatgactgaatcagtaccatgagaatgtagatattctgaagattgccatgagcaacaaagcatcctttgtctcagactcagaagtctcatgttttctgaacgtatctgtgaaactgacaagccaacttactagcttacaactagggtaaaatctcagatagttcatagttcttgggaaaagaaaataccctgtggtactggaatagaattaaacatatgagtgtaaactggtgtgtttttaacatataaacaaataaatagacataaatgtgcatgtagacatttgtgtattttctcactctctccactgaccagaaccagagcaaagacacaccagtagcaataagcacaccaagtgcccagatcttggtttataaattcattctccaataaaagaaattaatgctgcttggagaaattgctgagcccagagatggaagagggaaaatacaagatgaacctggaacatcttatgtcccagaaagcggggttggggggaagctttaaaaaatgatcacacgttgaaaagacacaagagccaacttaaggagcttctgatggccaaatatgggaaaatttgaacagcaaaataaataaataataataatagagaatagaataaaataaatatccatgagtccataggtaaataattgaataaacaaatggggacaaaagaaaaacttcagctgaattaaatgtaaaggagtttcattgaacaatgaacgattcgcaaatcaggcagcccccagaatcacggcagattcagagacactccagggatgcctcgtggtcagaacaaatttatagacaaaaaaaagggaagtgacatacaaaaatcagaagtgaggtggagaaacagctcaactggttacaagttcttgtttgccttttttttttgagacggagttttgctcttgttgcctaagctagagtgcaatggcacgatctcagctcactgcaattctcctgtgtcagcctcctgagtagctgggattacaggtgcactccaccacacctggctaattttttgtatttttagtagaaatggggtttcaccatgttggtcaggctggtctccaactcctgacctcaggtgatccgcctgcctcggcttcccaatgtgctgagattacaggcgccagcctctgtgcccagacagtgtttgccttacttaacacagtttgaacactcagcagtgtatgagtggttgaagtattgctgctgggattagccaagactcagcttgttacaggcacatacactgttacaggcacacaagttaggtttccaattctgtctacctgttaggttacagttcgtccataaggactcaaatatagaagtacaaagtccttctcaggccacatttagttcacttttaacaggagcaagaagagacagctcttccttatagtagaatttaaattatcaaagtgtaagaaatgatagaaggagaaaatcaccgctaggcaaacatcacagtaataattgttacaggtaaaaattatcaatgaatgttaaaactaatgcgtgagaaaacatgatgagaaataggattttggcatagtttcttttttttttttttttttttgagatggagtctcgctctgtcacccaggctggggtgcagtggcgcgatctcagctcactgcaaactccacctcccgggttaacgccattctcctgccagagcctcccgaatagctgggactacaggtgcccaccaccatgcccagctaattttttgtatttttagtagagatggggtttcaccgtgttagccaggatggtcttgatctcctgaccttgtgatccgcccacctcggcctcccaaagtgttgggattacaggcatgagccaccgcgcccagccatttttacatagtttcaaattatttccccacaagatacttattcaataaaatgggaaaaacagtgattttacagaggagaaatctggcaaacaacactgttaccaagttctcaaagttaacattgctaataatgagatatactaatatatatatctcctgatatgacacattgagaagagttcaacatcatttctgtgatcttcttgccaaaactgcccagtctaaatctaaccataaggaaacatcaggcaaacgcaaattgaaagatattctgcaggctgggtgtggcaatcccagcattttgggaggccaaaacaggaggatggcttgaaagcaggagttcaagaccagcctgggcaatatagcaagatgctatctctacaaaaaaaaaaaaaaaaagaaaatagccaggagtggtggtgtgcacctgtagtcccagctactcaggggctgaggtggaagaattgcttgagccctggaggttgaggctgcaatgagccatggtcatgccactgcatttgcactccagcctggatgacggagcaagaccttgtctattaaaaaaaaaaaaaaaaaaaaaaagtggccggtgctgggcgcggtagctcatgcctgtaatcccactactttgggaggtcaagtcggccagatcacctgaggtcaggagttcgagaccagcctggccaacatggtgaaaccccatctctactaaaaatacaaaaatcagccgggggtggtggcaggtgcgtgtaatcccagctactcgggaggctgaggcaggagaatcgcttgaacccaggaggcagaggctgcagtaagctgagatcgcaccattgcactc[144 bp omitted]gaaaccctgtctctgctaaaaatacaaaaattagctgggcgtggtggtgcgctcctatagtcccagctgctcgggaggctgaggcaagaatatcgctggaacccaggaggtggaggttgtggtgagccaagattgtgccattacactccagcctgggtgacagagactccgtctcaaagaataagacagagagagaaagagaaaagaaaagaaaaagatattttacaaaataactggccagtactcttcaaaagtgtcaaagtcctaaaagataaaaaggattaaagaacactcaaagatggaaggagactaatgaaacaatacaattcaatgcaggaccttggattggatcctgaaacagtaagaaaatttagcaaaatttgaaaaagggctctaacttaattaaaagtcttctatcagcataaatttcctggttttcatcattgcactgtgggcacctgcagagtatctgcaaattccttatactatgttcacaacatgaaaataaaattttaggccaggcatagtggctcacacctgtaatcccagcactttgggaggacaaggcagttggatcacctgagatcaggagtttgagaccagcctgaccaatattgtgaaaccctgtgtctactaaaaatacaaaattagctggccgtggtggcgcaagcctgtaatcctggctacatgggaggctgaggcaggaggattgcttgaacctgggaggtggaggttgcagtgagctgagatcatgccattgcactccagcctgggcagcaagagcgaaactctgtctcaaaaaaaaaaaaaaaaaatgaaagaaagaaagaaaagaacatttttaaaaaatttacgaaggggaaaatggacacaaaaaagaagatatacaaatggccagtaaacatacaaaaaggtgctgaacatcatttcacatcaaggaaatacaaattaaaactatgatgaggctgggtgcagtggctcacacttataatcccaggattttgggaggctgaggcgggcgggagtttcacatggtgaaactctgtctccactaaaaatacaaaaattagctgggtgtggtggcacgcacctgtaatcccagctactcgggaggctgaggcaggagaatggcgtgaacccgggaggcggagcttgcagtgagccgagattgcgccactgcactcccgcctgggccacagagcgagactccgtctcaaaaaaaaaaaaaaaaacaaaccaaaacaagacaaaacaaaccaaaacaaaaacctatgatgaaactgcaccacacaaccaataaaatagttaaaagactaaccataccaaattacggagaggatatgaagcaactggaactctcatacattgctggatggagtgtaaactggaacaaccacatgagagcttcgtagtatctattaaacattagcctaccctatgatctagcaatgccactcctaagtattaacccgggagaaaagccttcatgtgttcaccaaaaacacagcagagtgttcacagctgcagcatcatttgtaacagccccaaattggaagctacccaaatatccatcaacaatgtaatcgactaatatactacaatatatccccagtatagtgagagctaagtacaattacactgaacaacatgaatgaatttcacaaacataatatataacaaaagaagcctggcataaaacagtacatgctgcataattgcatatatacatgaagttcaagaatgtgtaagacagccagatgcactggctcatgcctgtaatcccagcactttgggaggccaaggtgggcggatcacctgaggtcaggactagctttgccaacatggggaaaccctgtctctactaaaaatacaaaaattagccgggtgtgatgggtgcctgtaatcccagctactcaggaggctgaggcaggagaatcgtttgaacccaggaggcggaggttgcagtgagccaagattgcatcactgcactccagcctgggtgacaagagcaagactctgtctcaaaaaaaaaaaaaaaaaaaaaaaaaagaatgggtaaaactagttaatgatagaattctgaatagattgtgtgggggagaaattactgagaagtggtatgagggaagcatctcaggtcctggcaaagttctttgtatagatctaagagtgttacacagctgtacacttaagatttgcacactttatataggctctatgtatctattgacagcctcctgctctgttgcccaggctgaagggcagtggtatgatcatggcttcctgcagctgcaaagcactgggctcaagcgatcctctcatctcaacctcctgagtagctaggacttataggtgccagccaccatgcccggctaattttttatgtatgtatgtatttatggtagagttagggtctcactatgttgcccaggctggtctccagctcctggcctcaagtgatcctctcaccttggcctggcaaagtgctgggattacacgcatgagcctccacacttggcctacaaaaatttttttaactcttggaactatgctttggtagggatatggagcaataagatatttcaaacattgctgttcaagtacaaatttgtgcagccactcgggtatatattttgacactgtttagtaaagtggaagatatatgaaccggcaattctgctggtaaataaactcaagcatgtgtaccccatgtgaaagaatgtggctgtgttgtttataaaatgaaaagctataaataactaatagggcatcattactagaaaggatgaataattgtggtatacttcagaagggagaatatagcaaagaaattgaattaaccgcgattttatctaatagggatgattcacagaattgtaaaaataaaccaaagacagtatgacaacattcatataaagttttaaaacggggaaaaactggagtataatgcctagagaagtatacgtaagtgataaaacctcacactgtgtgacttaccctgccacacaaacctgatcacactcccaccatggggacattcagctacagacaatccacgcccaaagcaacagggtcgcacacgcagggcctctatcggtcacataagcacaagtgcacgcttaccgaggaggcagtcacagtcacaaccacattgtcacagtcggcgcacacctgtaccgggtcacagtcacgatcacacattaaccacagccacacacacagatagaaacatgcagttactcgcaggtatccccacctgaactctgccgcacacagtcacacagcatatagtcgcacaccactacggggacaaacgcagtaacactcaaccaggcacaagctccccacagccgcacacacaatgccgcacgtggtcctgctccctctcacacacacaccagcagccacagtctccgaggccgtgctgcacacggtgtgagcgttggaaacacactcatcacaagggcagcctgtcacaatcgcgcgatcattcaccacacacctccacacagacgcaagcgcacgctttcaatctcacctccaccgccgcacaaagccgaggcttggcccccggccccgccctctcccgggtttctcacctcaggccttaccagctttcgaagcagcagaaccctccccggcactggggtagttgctggtaaagccctgagggtcccgccagcgcgtgagttggaagctgaattaccgcgagaagtacagtcttgccgaggagacctctgggaagcgtagtcagagacgtatcaaggccggacaagatggttcccgatcgtcagaattcctgtccgcgccttgcgtcagccccgccgaaaggatcgccccccctagtcaaaccgctcgcgccccagaggcctcatggagtcccgcctcaggctcgggccttggcccccaaagaaagccactccgacgtgtttgagatgggcttagttcccggacccgtcctactgcccccaggcgctggacagcctcagaaagaggacaagtctgcatggaaagataatcgcacaactgagccttctgggagatgtagttcggagctgggaaggcggttggaccctccgaaagtcatcttaattgctctcacagataagccggtgctgggctgccggcctgagtactgtgcgcccagagtgcgcaggcgcaaacatcctgggttgctgttttggcctctttgttcgggcgtgaattttgtttattgctccttagtgcagaggggttatgggaccagaggttgtgagactcagaagtggttggggacgcagaaggggtgtagaccaggaacctgcgacctgatggggggaggtcgaagggaaaggaatcgccaaacgtgggacaggtttggagaggcagaaagagaggagtctgaaattgcaaagggcaggtgttattctgacttctgtgtgctttgtgataaatgagtggggcaggaagtaagaggagtttcactttctccttctgcaattatttgtgtacttggactaagtgtatctcatggccagtatttgactgcttttgacctataaaggtattgtatacacagtcatgcatagtttaataataaggatatatgctctccccacggtctccctctccctctctttccacggtctccctctgatgccgagccaaagctggactgtactgctgccctctcggctcactgcaacctccctgcctgattctcctgcctcagcctgccgagtgcctgcgattgcaggcgcgcgccgccacgcctgactggttttcgtatttttttggtctccaccaaacacagggtttcgctgtgttggccgggctggtctccagctcctaaccgcgagtggtccgccagcctcggcctcccgaggtgccgggattgcagacggagtcttgttcactcagtgctcaatggtgcccaggctggagtgcagtggcgtgatctcggctcgctacaacctcctcccagccgcctgctttggccccccaaagagccgagattgcagcctctgccccgccgccaccccatctgggaagtgaggagcttctctgcctggccgcccatcgtctgggatgtgaggagcccctctgcctggctgcccagtctggaaagtgaggagcgtctctgccaggccgcccatcgtctgggatgtggggagcgcctctgccccgccgccccgtctgggatgtgaggaacgcctctgcctggccgcgaccccgtctgggaggtgaggagcgtctctgcccggccgccccgtctgagaagtgagaccctctgcctggcaaccgccccgtctgagaagtgaggagcccctccgcccggcagccgccccgtctgagaagtgaggagcccctccgtccggcagccaccccgtctgggaagtgaggagcgtctccgcccggcagccaccccatccgggagggaggtgggggtcacccccgccaggccagccgccccgtccgggagggaggtgggggggtcagccccccgcccggccagccgccccgttcgggagggaggtgggggggtcagtcccccgcccggccagccgccccgtccgggaggcgaggggcgcctctgcctggccacccctactgggaattgaggagcccctctgcccggccagccgccccgtccgggagggaggtgggggggggtcagccccccgcccggccagcctctccgtccgggaggtgaggggcgcctctgcccggccgcccctactgggaagtgaggagcccctctgcctggccacgaccccatctgggaggtgtacccaacagctcattgagaacgggccatgatgacaatggcggtgttgtggaatagaaaggcgggaaaggtggggaaaagattgagaaatcggatggttgccgtgtctgtgtagaaagacgtagatatgggagtcttttcattttgttctgtactaagaaaaattcttctgccttgggatcctgttgatctgtgaccttacccccaaccctgtgctctctgaaacatgtgctgtgtccactcagggttaaatggattaagggcggtgcaagatgtgctttgttaaacagatgcttgaaggcagcatgctcgttaagagtcatcaccactccctaatcttaagtacccagggacacaaacactgccgaaggccgcagggtcctctgcctaggaaaaccagagacctttgttcacttgtttatctgctgacattccctccactatcgtcctatgaccctgccaaatccccctctgcaagaaacacccaagaatgatcaattaaaaaaaaataaataaataaataataaggatatattctggccgggtgcggtggttcacgcctgaaatcccagcactttgggaggctgaggggtttgagaccagcctgggcaacatggtgtaaaccccgtctatactaaaaatgcaaaaattagccgggcatggtggtgcgcgcctgtagtcccagctactcgggaggctgaggcaggagaatcgcttgaacccaggaggcagaggttgcagtgagccaagattgcaccactgcactccagcctgggcgacagagtgagactcggtctcaaaaaaaaaaaggatacattctgagaaatgcattgttgggcaatttcatcattatggagtgtactgacacaaacctagatggtatagctgactgaacacttaggctacatggtataacctgttgctcctaaactacaaagctatacagtatgttactgtactgaatacagttggaacactgtagggaccagccctacaaggtctgtgggtttttctccctgtgtgcagagactagaggtggtagaaataaagacacaagacaaagagataaaagacacctgggcccgggtgagccactaccaccaagacacagagactgatagtggccccgaatgccaggctgcactgttatttattggatacaagacaaggggggcagggtaaggagtgtgagccatctccaatgataggtaaggtcacgtgggtcacgtgtccactggacagggggcccttccctgtttggcagctgaagcggagagagagagaagacagcttacgcattatttctgcatatcagagacttttagtactttcactaattttgttactgctatctagaaggcagggccaggtgtacaggatggaacatgaaagcggaccagtagtgtgaccactgaagcacagcatcacaggaagacggttagacctccagataactgcgggcgggcctgactcatgtcaggccctccacaagacatggtggagtagagtcttctctaaactcccccggggaaagggagactccctttgctggtctgctaagtagtgggtgcttttccttggcactgacgctactgctagaccacaatccgcttggtaacaggcgtcttcccagacgctaacgttccgctagaccaaggagccctctggtggccctgtccgggcataacagaggctcacacacttgtcttctggtcacttctcaccatgtcccttcagctcatacctctgtatggcctggtttttcctaggttatgattgtagagtgaagattattataatatttgaataaagagtaattactacaaactaatgattagtgatacttgtgtataatcatatctgtgatctgtatctagtgtaattcttgttattttatatattttattatactgaaacagcccatgccctcggtctcttgcctcggcacctgggtggcttgctgcccacagaacacaatggtaagtatttatgtatctaaacatatctaaacacacaaaaggtacagtaaaaaaaacagcatgaaaagtaaaaaatggtacacttgtatagggtacttaccaagaatggaggctgcaggactggaagttgctctggagagtcgatgagaggtgagtgaatgtgaaggctaggacattacagtacaacactctagactttataaacattgtacacttaagcaacactacatgtatttaaagtttttcttccataataaattaacccttgcttgctgtaacttttctactttataaatgttcaaatttttaaaagctttttgacttttctgtaatatcgcttagcttaaaacacaaatacattgcacagcccatgtgggatccgtatctcttggtaaggaaatgttgcaggtcagatgtcattcttatgtggccacatagaggtagaaagactgcatatatgatactgcctttcccaaccacgggctcgtattctaacataccgcaacaatgcccaatatttatggggtcatagaaaataggattcactatggttggagaatttccagagccaatttaagttcaggaatgctggcaatgagaatgatcagtaggaatcagtgtaatgatttacatagttgaaactatcaactgggccaggctggtggctcacgcctataatcccagcactttgtgaggctgaggtgggctgatcacctgaggtcaggagtttgagactagcctgggcaacatggtgaaaccccgtctctactaaaaatacaaaaattagctaggcatggtggcacacacctgtgataccagctactcgggaggccaaggcaggagaactgcttgaacttgggaggcagaggttgcagccagccaagatcatgccactgcattcaagcttgggtgacagagcaaagactccatctcaaaaaaaaagttaaaatagaataaaacatatagccattatttttctgtttggggcaattttaaagtttttcttttgtcacaaaaacaggaatgtactatgcaaaggcttgaaataggccatcttttttttttttttttttgagttggagtttcgctcttgttgcccaggcaggctggagtgcaatggcatgatctcggctcaccacaacctccatctcctgggttcaagcaattctcctgcctcagcctcccaagtagctgggattacaggcatgcactaccacgcgtggctaattttgggtttctagtagagacgggatttctccatgttggtcaggctggtctcgaactcccgatctcaggtgatctgcctgcctcggtctgtcaaagtgctgggattacaggcatgagccactgtgcctggaaaataggccatctttttaaacaaaaaggcaatgattcacaaaagtctatgaatagaacatgtaactagttgatacaaatctaataggatttgtttaaaatcagtcaaatctaatacatctgaagtgttcttgtataaagtatcacatgaagaaaagaagaatttattaatgtcttaaaaaaatgggtttcttcatagacaatatgacaacttaccattaaaagtgtttcgggacggccgggtgcagtggcttacgcctgtaatcccagcactttgggaggccgaggcgggtggatcacgaggtcaggagatcgagaccatcctggctaacacagtgaaaccccatctctactaaaaatacaaaaaattagccgggcatggtggcgggtgcctgtagtcccagctactcgggaggctgaggcaggagaatggcgtgaacctgggaggcagggcctgcagtgagccgagatcgtgccactgcactccagcccgggcgacagagcaagactccatctcaaaaaaaaaaaaaaaaaaaaagtgtttcaggagacataaggaaatgcaacattattcttcctgaacacttttagttcaagactttccactcaataaaataggaaaggatctgaaactgagaaaatgtatttgagtacaaacagcttgtgaaacataatacttttttttgcatcatcagagggttttactgaacttataaccaacttgcccactcagtatgcaattcagatgtgagtgaggggccgggcgcagtggctcactcctgtaatcacagcactttggaaggcagaggcgggcgagtcacctgaggtcaggagttcgagaccagtctgaccaacatggtggaacctagtctctaccaaaaatacaaaaattagctgggcgtggtggtgtacacttgtaatcctaggtactccggaggctgaggcaggagaatcgcttgaacctgggaggcagagattgcagtgagtccagatctcgccattgcactccagcctgggtgacagagcaagactccatctcaaaacaaaacaaaacaaaaaaaacagatgtgagaggacagaggtgtctcacaggagcctgtactgtcttcaatcctatgtgtgcaggtatctaccacaggcaaacagtttctccacattttgtagttatatgatcttgctactagcaaaaagaggtaaacagcccctgtagaatgaagggactacagtcacgggactagagtcacagaatgaagctttcctcttaatattttttaatttgatgtttgaactctttttcttttttccttgagacagtcttgctctttcgcccaggctagagtgcagtggcacgatcttggcttactgccacctcctgtgttcaaacaattctcctgcctcagcctccggagtagctgggattacaggcgctcgccaccacacccagctaatttttgtatttttagtagagacggggtttcaccatgttggccaggctggtctcaaactccttacctcaggtgatccacccgcctcgggctcccaagtgctgggattacaggcatgagccactgcgcatggcccgatgtttgaactctcaatgcagcatcctagagaagggtgttcgggacctcctgtgcccaagggaccgataaagaaaaaagctccatttattatttgggatttgatgcacagatgaaaaacttaacacacaataacggaagtcggttgttagtaaatcacatcctagtctttcagcacttccataagagacgacatcttcagttgtctagttcttgtagttttagcacggcaacatcaatgatgcctatgtccagaatcagttaaaaagaccataatttgtttctcttagttcatctatttttcactggctcatggtcccaagtgtatctgaatgattacctttgggcattctctgctattgcttattagggtgctgtcgattgtccccatgttttgtgggctggttgggaaggggagcttgggaaggatgtgtcactctcaggaggttgtaagtcattgggacgcctccagggatgattccttccatggctgcaggaagtcctcctggagccacgcccacgatgcctggcggatatctgtatgttgcaccgttgagctcgggatgaattgcttgctggtctattgctgaccaaggcgctgatgtgacaaataactccttgttcacacagtttcttaagctttctgggacgcgacctgtgatgactcggcggatctcggtggcagctgcctccttcatctccagtgacgcctgcatgctgtcctaggcagtgtgaggagtgaagatgagatttggcgcatctttcaacggagtctgagcaaagctaaagggctccgattcgtgcaagccaagggctgcccctcctatcctgtcctccttgaggacctgtgctaaggctttctcatccaccaggccaccatgggctgcgttcacaaggaatgctccctgtctcatctgctttatagtaaagtcattgacgaggtggtggttatgttcattgagattgcagtgcaacgagacacagtcactctgatacagcaaaccctgcagggtgtatcagggtcccctctgcatgccctgggacctctctatcttgtcctacaagtaggggtcataaaatacgacgctgaatccaaaggccttggctcaaactgcaaccgcctgcctcatgcaaccgaagcccatgaggcctagcgtcttccacgaatgagggccactcccatggccacctcgagaatctgctccacgctctgaacccgcgcgccttcccacagtgtctggtacagccacatattcctccggcagagattgaggatgtggcagatagtggagttggctgcctcttccacggctgtggaggggatgttgcacatagtaatccggagctcactggcagccttgatgtccacgttgtcgtagccacttgcctatccacacgatcactctcagggccttgaacttctccaggtcctcccttgtttagaatcttctcgtggatctcctgcgtggactgtgcgtcacagaaggccacagtggccaggtccttcaggatgggcatctccacggtgcaggtcacagccatccagcggcgccagcagcgggagggggtgcagggggctgttcgtgatctgagggtggatagcttcacaagttctgtccaatcgctgtctcgtgattttgtgcttatccaccagggccattctttatggaactttgcaactctcagatcaaaaggcaaagcaggcctggcatggtgcctcatgcctgtaatcccagcacttgggaggctgaggcaggcagatcacttgaggtcaggagtttgagaccagcctggccaacatggggaaacaccatctttactaaaaatataaaaattagctgggcatggtggcgcgctcctgtaatcccagctactcgggaggctgaggcaggagaatcacttgaacccgggagtcagaggttgctgtgagctgagatcatgccactgcactccagcctgagtggcagagtgagactctgtctccaaaaaccaaaccaaaacaaacaacaacaacaaaacaaaaggcaaagcagtcctctaaaaacttacggaaactcgcaggagtgtgtgtgcatgacgccactatgaacccaatacatatctgtccacaaactctatagttcacaggatgggctgtccatcttttctttctttctttctttctttttgtcgccaggctggagtgcagtggcgcgatctcagctcactgcaatctccacctcccgggttcaaacgattgtcctgcctcagcctcctgagtagctgggattacaggtgcacaccaccacacctggctattttttgtattttagtagagacggggtttcaccatgttggacaggatggtctcgatcttctgaactcgtgatccacctgccttggcctcccaaagcgctgggattacaggtgtgagccactagctgtccatctttttaagggaatgcagcttcgtcagttcaaaaacatttaaggtgatgaaaccctcgtcctgggcagtcagcatccacagcggaaaggctcccgcccctcccaccccacctggaggctgtgctgcctcagttcagtgcagcatggctcctggttcagtccttcgctcctcgggccgctcccaagccaccttaaaatgacacactgaatttggattattattattatctttttttttttcagacagagtcttgcagttgtcgcccaggctggagtgcagtggcgcaatttcggctcactgcaacctccgcctcctgggttcaagcaattgtcctgcctcagcctcccaagtagctgggattacaggcacctgccaccacgcccagctaatttttgtatttttggtagagacggggtttcaccatgttggccaggctggtcttgaactcctgacctcaggtgatccaccctccttggcctcccaaagtgctaagattacaggtatgagccaccaaccctggtctaaacatttatttttttaatttcttttttctttttttttttcttttttgagacagagtctcactctgttgcccaggctggagtgcactggcacgatctcagcttactgcatcctctgcctcccgggttccagtaattctcctgcctcagcctccagagtagctgggactacaggtgcccgccaccatgcccagctaatttttgtacttttagtagagacaggctttcaccatattggccaggctgatctcgaactcctgaccttgtgatctgcctgcctcggcctcctaaagtgctgggattacaggcgtgagccactgtgcccggctattttttatttttttgagacggactctcggctcactgcaaacctctgcctcctgggttcaagcgattctcctgcctcagcctcctgactaactggattacaggcatgtgccaccatgcctggttaatttttgtatttttagtagagacggggtttcaccatgt[137 bp omitted]atctactatatattttttatattttcattttatttttaattaagaagtaataattgcatgtatttatggggtacaatttgatgtgtacattgtatacatcgtgatgtgtacacaatgacacgtgtacattgtggaatgattgaatcagcttttccaagtgtgtttccttctcagcacctccaaacctctcctcaagttaaccccaggccttgagagaaacaaagtgctctcccttaaactgggtcgctttggttctcagtggaaagttgagtcacagagggaggctctctttcatgtgcttgggtttcactcacttttatcagctggacactgccgcaggggctgattgctcccactcccttccccaggttctgggttatcgttcatgattccagtggatttccatttttcttcttgaaataaagtacatggagtttatctttatgcactatcatgctatccccaagtgactgaggcattctctaatctgccatcttggaggaagaaaagttttaactttgatatcacagtttacatataatttgtatcaattaacaaattattgtagctatgggtgttttgtagtagttttgtcttttttttttttttaagtcagagtcttgctctgttgcccaggctgttgtgcagtggcgtgatcttggctcactgcaccctacaccttccaggttcaagcaattctcctgcctcagcctcccaagtagctgggactacaggtgcgtgccatcatgcccggctaattttttgtagttttagtagagatggggtttcaccatgctgggcaggctggtcttgaactcctgacctcgtgatccccctgcctgggcctcccaagtgctgggattataggcgtgagccaccgcgcctggccaccagttttgtcttttaatcttcaaactagagagagaattgatttacacctcaccattacggtattagaatgttgtgaatttcacaatgtacttattttttacctataagttcgttttcgttttttttttttttttttttttttttttttttgagatggagtctcattctgtcacccaggctggagtgcagtggtgcgatctctgctcactgcaacctctgccttgcaggttcaagtgaatctctgcctcagcttcccgagtagctggattataggcatgtgccaccatgcccagctaatttttgtatttttagtagagatagggtttcaccatgttggccaggctggtcttggatttctgacctcaagtgatctgcctgccttggccttccaaagtgttgggattacaggcgtgagccagctcgcctggccagttttatatactttcatgttttcatgttactaataaatgactttttccttcagcttgaagaattctctttagcatttcttgtagggcagatataggagtgttaaacaccttcaacttttgtttgtctgagaaagtcttaatttctccttcatttttgaaatacaggttatctgagtatagtattctcacatggcagttgttttctttctaacaatgtatcatcccactcccttctggcctgcaagatttctgctgaaaaatccactgatgatcttattgaggtgactttgtacatatgtgaacataagaagtcactttttccttgctcctttaaagattctctctttgtgtttaacttttgaaaatttgattataatgcacatctgtgtgggtttcttttgatttctcctatttggtgtctttttggctgcttcgatctggatttatatttcctttcacaggcttgggaagttttctgccgttatttctttatctaagctctctgtctccttctcttttatccttctgaccctttggcaatgtgtgtattggtctgcttgatggtgttccaaaagtcccttatgctgtcttcactattttatattcttttgctcctcagattggatgatttccaatgacctgtttctgagtttgttgatcctttcttctgcttgaactagtctgatactgaaccctttattgcatttttcagttcagttgttgtactcttcagcgctaatatttcttttcttttttttttttttaaacagagtcttctctgtcccctaggctggagtgcagtggcacgatcttggctcagtgcaacctctgcctccgggttcaagcaattctcctgctcagcctcccaagtagctgggattacagttgcacgtcaccacgcccagctaattttttgtatttttagtagagatggcgtttcaccatgttggccaggctggtctcaaactccttacctcaggtgatccacctgcctgggcctcccaaagtgctgggattacaggcataaacctccctacttggccatccctaagatttctgtttggtactttttttatattttctgtttattgaaattctcaagattgttcatgcattgctctcctcaccttggtgagcatctttgtgatgattcttttgaattgcctgttgggtaaatcacattatctccatttcagtagggttggtttctggaaattaattttgttctattatttggaacatatttccctgtttcttcattttccttgtatctctgtgttggtttctgtgtattaataagaaaacagtctcagttttttcacactggcctcacatagaacagcctaatcaataagtctaaggttcctctcacatttttgtgtttgtccaaactgcagtctctgtttttagtgacccctaggagattaggatgtgccaagacctagcagtactctgagtcaggtaagatagaaaccagtccctctagatgcagctggaaagattggggcattagctatgtcttccacttcattttatcctcagggtgaagctgagaggagtttatctccaagtctctctgcattaagtcagggagtgtatctgtagcaaatgcctgcactcttcttcagattgcgtgttctgatcctctgctggacgtgggatcattgaatgtccacatctttattttctgtggtctagggaggctcgggaatgctgagctcaatcaacttacagagctaggtggttatagaggcaaccccatggaagggagctgtagaagttatggcactcaatgcatggacaaactccttcagggagcatctacatacctggctttattgctcgagcaaactgagggggaaaagcgcaggaaatgcctaagctcctgttcaggttcccatatgtctattgcttttctaccccactggtttccaggtgcaggatagattctcaaaccggagttgaaaaagtgtgcagatggacacttccagagagaaactgagaggtgtgcactttagaccattctctgcactgatcctgagatg[144 bp omitted]gagaaaccttgtctctactaaatatacaaaattagcaggctgtggtggcgcatgcctgtaatcccagctactcgggagcctgaggcaggagaattgctgaacctgggaggcggaggttgccgtgagcccagatcgcaccactgcactccagcctgggcaacaagagcgaaactccgtctcaaaaaacaaaaacaaaaacaaacaaacaaaaaagccacctctttattctgtgatctagagaaactagtgaatgccaagtcctttcgttcccaattttagatggtttaggatggagcctcctagttgggagctgtgaaaactggggcactctatgtgtggaaatcgctttttttttttttttggaagaatctgtagacatggagtaagccacggggagacttggaaagtgccaaacttccatttaggctcccaagggtctataccctgttagatgtaggctggttagaagcctgtcacgcagcaactggaggagtgttctgggaaaccccttctgtggcaaaagacaaataaaataaatttgccatcttaagactttttttttttttttgagatggagtcttgctctgttgcccaggttggagtgcaatggcactatctcggctcactgcaagctccgcctcctgggttcacgacattctcgtgcctcagcctcccaagtagctgagactacaagcgtctgccaccacgcccggctgattttttgtatttttagtagagacggggtttcacca[140 bp omitted]ctggagtgcagtggtgcaattttggctcattgcaacctccgactcctgggttcaagcgattcttctgcctcagcctcccaagtagctgggattacaggtgcccaccaatgcacccggctaattttttttttttttttgtatttgtagtagagacagggtttcaatatgttggccaggctggtctcgcactcctgacctcgtgatcagctcacctcagcctcccaaactgttgggaatacaggcgtgagccaccgcacccggcccccatcttagacattttaaagtgtactgttcagtggtattaaatacattcataatgttgtgcaaccatcaccaccacccatctttataattcttttcatcctgtcataatgaaaatctatacccattaaacaattaactccccattcttcttctctgctaaaaaccataattctactgtccctatgattttgactactttaagtaccttggataagtggaatcatatagtatggtctttttgtgactggaatatttcacttagcattatgtgctcaaagttcatccacattgtagcctattacagaatgtccttcattttcgaggcctaatactattccactgtatgtatataccacattttgcttacccattcatctatctataggcactggggttgcctccatgttttcggtattatgaataacgctgctataaacatgagtgtttgagtactttctttcaattcttttaagtatatactcagaaatggaattgtttaatcatatggtagttgtaggtttaatgtttttctcttttcttttggagacagagtctctctctgttgcccagacaggagtgcagtggtgagaccacagctcactgcagcctcaatctctagggttcaagcaatcctcccacctcaacctcctgagcagccttctgaggtggcaagggctgaagttgctgtggactgatgtgaatacactgctggaaacttgggataacttggatctgtgccactgctaacattatcatgacattatcaagaattcagggagcggtggctgacgcctgtaatcccagcactttggaaggctgaggcgggtggatcacttgaggtcaggagttcaagaccagcctggccaacatggtgaaaccctgtctctaccaaaaatacaaaaattagctgggtgtggtggcaggtgcctgtaatcccagctacttaggaggctgaggcaggagaatcacttgaacccgggaggtggaggttgcagtgagctgagatctcaccactgcactctagcctgggcaacagtgcaagactcaaaaagtctggccaggcgcggtgcctcatgcctgtaatcccagtactttgggaggccgaggcaggtggatcacctgaagttgagagttcgagaccagcctgaccaacatggagaagcactgtctctactaaaaatacaaaactatccgagtgtggtggtgtatgcctgtaatcccagctactcgggaggatgaggcagtagaatcatgccactgcactccagcctgggcaacaagagcaaaactctgtctcaaaaaaaaaaaaagtttgacttaggggcataaagtacaggtgcacaccaccacagccagcgaatttttatattttttgtagaggttgcccaggctggtctggaactcctgggctcaagagatccccttgtaagtggctgggcgcggcggctctcgcctgtaatcccagcactttgggaggccgaggtgggcagatcacgaggtcaggagattgagaccatcctggctaacacggtgaaaccctgtctccactaaaaatacaaaaaaattagctgggcgtggtggcgggcgcctgtagtcccagctactcaggaggctgaggcaggagaatggcgtgaacccgggaggcggagcttgcagtgagccgagatcgcgccactgccctccagcctgggcaacacagtaagactccatctcaaaaaaataaaataaaaaagagatcccctcctctcagcgtcccaaagtgctatatgtttaatttttggaggaactactctatttttttccacagtggctgcaccattttacaccctcatcaacagggcataagagttcccatttctttttttttttttttttttttttttggaggtggagtcttgctctgtcatccagactggactgcagtggctaatttttttgtattttgtagagaccatgttgtccaggcaggtctcgaactcctgagctcaggcagtctgcctgtcttggccttccaaagtgttaggattacaggcatgagccacggcgccaggccaggttcccatttcttttgatccttgtaaacacttgttattttgtgtattttgtttaatagctatcctaatgggtgagttggtaatcacattttagttttgatttgcaaagcactggcgcatgaaaaaatcttgggccgggtgcagtggctcacgcctgtaatcccaacactttgggaggccgaggcaggcggatcacctgaggtcaggagttcaagactggcctggccaacatggggaatcctcatctctactaaaaatacaaaaattagccgggcacgatggtgtgcacctgtaatcccagctactcgggaggctgaggcagagaactgcttgaacccgggaagcggaggttgcagtgagcctagattgtgctgctgcactccaacctgggcgacagagccagactgtgtctcaaaacaaaaaacaaacaaacaaaaaacttcttcggataaatggctatttaagtcatttacccttttgatctggttgtttgctttcattttgagtattaggaattttctatatattctggatattgatcacacatcagatacatgaataacttcaaatagtgactttgtctaatatctcagttt[136 bp omitted]cggtgaaaccccgtctccactaaaaatacaaaaaagttagccgggcatggtggcgggcacctgtagtcccagctactcgggaggctgaggcaggagaatggcatgaacccgggaggcagaacttgcagtgagccaagattgcgccactgtactccagcctgggcaacagagcgagactccgtctcaaaaaaaaaaaaaaaatcaattaggtaaatgtaaatgggatagacataaaaagacttttcatgtcatttgacatcgtaccattgtgttacttaattactggatacttactaaatgtcttggttggtaccaaataagattaaaaaaccaaaatatgaattgttgaacacaaatgtttgttcttggcattttaaatcttataaaaactctaaataggccaggtgtggtggctcacgcttgtaatcccagcactttgggaggccaaggtgggtggatcacgaggtcaggagttcaagaccagccttgctaacatggtgaaaccctgtctctactaaaaatacaaaaattagctgggtgtggtggcgggcacctgtaatcccagctactcgggaggctgaggcagagaattgcttgaacctgggaggtggaggttgaagtgagctgagatggcgccactgcattccagcctggtggacaggacagagtgagactctgtctcaaaaaaaaaaaaaaaaaaaaaggaaaagaaccaataggacagagagatgtaaacaaagttattaatatgaagatacatttttggtaaggcaagttaaaagcaaaagagaataactttgtatgagaaagaattttatgtgataaatattggtcctaaagtgatttttttttttaaaagaaagcataggacaaagcggaaagtcaaagtatgttgtcaaaggtctgaataagttgtgataaagttagtggtgacagagatctgaattaccccgttaacagtggtgtattcatacaagaccacagcaacttcagcctgtgccttctcagaagaaagaattcaactgaggggaagcagaaaaagagaccaaggcaagtttcagagcacgagtggaagtttattttaaaaagctttagaacagtaaagaaaggaaaattcacttgttagagagccaagcagatgcctgaaggtccaagaaagaaaagaccaaaaaaaaaaaaaaaagtctttggccgggtgcagtggctcacacctgtaatcccagcactttgggaggccgaggaggatgggtcacaaggtcaggagatcgagaccatcctggccaacatggtaaaaccccgtctctactaaaaatacaaaaattagctggacgtggtggcacacacctgtaatcccagctactcaggaggctgaggcagaagaatcgcttgaacctgggaggtggaggttgcagtgagccgagatcacgccactgcactccagcctgggtgacagagcaagacttcatctcaaaaaaaaaaaaaaaagactttaaccttgatcctaggactttatacattcacctctttcccatgattcttcccttagggtgggctccccaaatgcacagtgctttccttacccttgggaattgagcacacacagcatgtttagggagttatatacatgcccatctgaggcttttttcctttatctggtggcatgtggccctggaacatcatgtcgccattttgtctattaacacacatggccaagaatctgcttctccctgggtctgcactcaaattaacacttttaatgttaacaggtgtggaccatcaggagattgtccctccttggaattttcttttttttttttttttttttgagatgggagtctcactccgtcacccaggctggagtgccatggtgcaatctcagctcgctgcctctcgggttcaagcgattctcctgtctcagtctcccgagtagctgggactataggcatacgccaccatgcctggctaatttttgtatttttagtaatgacaaagtttcatcatgttggtcaggatggtcttgaactcctgatctcaaatgatccacctgccttggcctcccaaagtgttgagattacaggcgtgagccaccgagcccagcagaattatcatttttaaagaggcaatgtcaaaactgccatactattacctgacatttctagtgggtgggcagagagccctcacctgccttgctcaggcctaactacatgtaactataaaattcatgaaggattaatttacgcaagaaattttgtgtgtgaccaaattggctataattagaagacaattatttgtctaaatatttagctttgatattaaaatacactaaaatggccaggcgcaatggctcgcgcctgtaatcccaagcactttgggaggctaaggtgggcggatcatgaagtcaagagatcgagacaatcctgccaacattgtgaaacccagtctctactaaaaatacaaaaattagctgggtgtggtggtgcacgcctgcagtcccagctactcgggaggctgaggcagaagaatcgcttgaacccaggaggtggaggttgcagtgagccgagatcgcgccactgtactccagcctgggcaacagtgcgacactgtctcaacaacaacaacaacaacaaaaaaaaaaaaaaagaaagaaagaaagaaaagaaaacaatagccaggcatggtggcgcatgcctatagtcccagctacttgggaagctgaggtgggaggatggcttgagcctgggaggtggcagttgcagtgagccaagattgtgccacaatactccagcctgggcaatagagccagaccttaactcaagaaaagaaaaagggaggcaaaaagacaaataatcctatagaaaaatgagctaacaatatgaaaactctcaaagaggcaaatctgggagcaagtgaggtttatactcatcaaagaagcatacaattaagtagcatcataggatctattgtagagccagaggatatgttgttcttttggacctgactctgacaacatctattaaaaattttaaaataacatcaatcctttgatctaccaatcccttccctgtaatctgacccacagaaataaaaacaactgaaatctaaggggtgattacatgaatttttattgtaccatttcttatggtggcaaataagcaaactgtgagtaaacgagggcagctgaataaatttacagtatacaatattagagaatattatgttgcaattgctcatcttactctgaccatcataatcattctttttgctgggtccaggaccatggctaactcatggcacaaaaagctagtcctggtttggtctgaatttgagtcctagttattctggtgacttcaaggctacccaagcacatgggcaaaacacttaaaaaatatgaaagattatttaagtaaagcaaaatgaggaacagaagaagacagtttagattcatgtacacatacatatattttatttgggtatattacctcagaaaatcaacaactgtcattttcaatcttatctcaagaccaaccttcagaaatgctagtaagtgctacagtaatattaacattatattgagtttaaaagaaattaatatatttaaaatcagtctaaggttttaatgctgtatacccattttcataatcattcaaaaacatcaggccgggcacggtggctcacgcctgtaatcccagcacttcgggaggccaaggtgggcggatcacctgaggtcgggagttcaagaccagcctttggagaaaccccatctctactaaaaatacaaaattagccaggcgtggtggctcacacctgtaatcctagcactttgggaggccgaagcaggtggatcacctgaggtcaggaattcaagaccagcctggccaacatggtgcaactccgtctctactaaaaatacaaaattagccgggcatggtggcgcatgcctgtaatcccagctactcaagaggctgaggcaggagaaccacttgaacctgtgaggcagaggttgcagtgagccaagattgtgccattgcactgcagcctgggcaacaagaacaaaactccgtctcaaaaaaaaaaaaaaatcattagtagcgttctctgtcagtttattgtggaaagaaatcaagtaaacaaattctcaaaaagatttgcttcaaataagagaacactgtttaggtggaagatctcctttttcagcacggtcttcccaaggtaacaagggggttgggattgacttgggtgtgtctgacataattgagaaagaaatttagtctgcaggttaaaagtgaagctgaaatccaggagttaatgttttcctcaatggcttataaaaaaattgaagagtgacacagttttctcattttaaaagtggctaatttctaatgctaatactggttatgcagagtattaaaatttctgataaatgttttagtaaaaactaattctctccatgtctgtgcatatattatttaataatatgatccttaaatgtatgtgatccaaccaatctgtggcaaatcataacctccaagactatatacagattagaactacgtacagattatgtaaaatttactcttgtgacacatgagttattttaattgaatttaagttgccaccccaattaaaaattatttcatattttaaagataagattttagaaatatcttctacagaatattagtatctgactaggaatgtaagtccattatgtttcatgtacagcttcctcactcctatctggactttttaactttcagaagtttaaggaaataaatagcacgaatgatagaatgaacacaaatattaccaccacccagaattaatatttcgttatgtttacttagaatgtttctttttaataagaaatagatacaaaattgaagtatcctttaactaccatgcttggtaacatttcccttccacctcctttcttcctagaggtaaccactccacttttgggaactgagtatatacatatcctttcaatccattctttagttttacataatttatccataaccaattcttagtactagggctggttagtgttgattttattcaaattcacagaagcatcattacaatatgttcatcatttttcttcactctaattttttaaaaatatttctgttaatatatagacttaatttgtcacttaactgctagagagtactctactatgttactatcacattttattcatctatttcacaagagacagcatttgtttcccaacttctggctactataactcatggtgcaatgaactatacagctatagaccagtacatgactccctgtgttcatgtttcttgggtagatgcatatatatagtagttcccccttatccacagctttgctttccatggtttcagttacctgtagtcaccacagttcataaatagttgagaacagtacaataaggtattctgagagaaagatcatattcacataacttttatgattacagtatattgttataattgttccatattatgtttattattgttttaaatctcttgctgtgtctaatctgtaaactaaattttatcataggtatgtatatataagaaaaaaacatagacatagagtttggtcctatctgggttttaggtatccactgggggtcttagagtccatctcttgcagaaaataggggactaccatactcaagagtggaactaccgggtattctggaatgttttagaagttctttcctgccctaaggttttaaaaacatcttcttataaaactgttatattattaagtattgctttttgcattttagtctttagtactttaagaattcataagaaaaatattttatattatgatgggagatattatttttccatatgaagagtcaattaatttttaagtaatccatgatttccccaccaatctgggataccgcctctatcaattaccaattccccatatattcatgcacacatttctgaattcaatattctgtctcagtctcagttttatgactgcttcaacaacaaataattttgatgattctagttttacaattcatatatgtagcaaaacatcacaaaaatgataattttgtctcttaatttcaaatcctcatacatctcatatctatttcttaatgcatctgtaggccttccaggaacacattaagtagtgtccatgactagatcctaactttaatgagtatactcctagaagtacagcattgataatgcttgttgtgggagttttgggggtacgggttttctttacactataatacttattaaacatcatagtatttaagttttgaattgctgctgaaggacttcccacattcatgtcactttaatgtaaaatgaattttccaatacactattaagtgtaaaatctgctgaacgttttgctaaatccaaggcattcatagagaactttaatgagtatgaattctctggtgtctaatgtgatgtgacttttggctgaaagctttcccacattcactacactgataaggtttttcaccagtatggattctcatgtgcagagcaagggttgagaactgagaaaaggctttcccacattcattacaaccatagggtttctcacctgtatggcttctcatatgcacagtaagagatgagctttgacagaaggctttcccacagaccttacactcataaggcttatcacctgtatgaattctcacatgtacaataagtgatgtgattcgagagaaggcttttccacatttattacattcatagggtttctctcctgtatgaatattgtgatgtttaatgaggtattgcttctgcctgaagattgttccacattcattacatttgtagggtttctctccaatatgaattttctcatgctctgtgagatttgacttgccactgaaggctttcccacattccttacacgtataaggtttctctcctgtgtgacttctctggtgtctaatgaggcttgacttctgaatgaaagctttcccacaccctttacattcataaggtttctctccagtatggattctctgatgtataatgaggttttccttctggctaaaagcttttccacactcactacatttaaagggcttctttccagtatggatgttctgatgtttaatgaggtattgcttctggctgaaggctcttccacactgattacattcaaatggtttttctccagtatgaattttctcatgctcagtgagatatgctttgccgttaaaggctttgccacattccttacatgcatagggtttggttcctgtatgatttttctggtgtctgatgatggttggcatctgaatagaaactttttcacattcataaggtttctctccagtgtgatgtttctgatgagaaaggaagttttccttctggctgaaggcttttccacatttattacatttatatgccttctttcctgtgtgacttctaaggtgtagagtaagagatgagactcgagagcacactttaccacattcagtgcattcatgagatttctctccagtatgcattttcttatgctctacaaggttttgcttcaggctaaaagtttttctacattcattacattcataaggtttctctccagtatgaatttgatcatgctgaaggagatctgattcatgctgaagactttccaacatgcctatcatgcatgtgaatttaatcaggagatttccctagtatcaaataagatgtaataaggatgaaagctttcccacattcactaaattcatatggtgtattttcaatattaattctcaggtatctaatgaagttaaatttatgatggaagacttttctcacattgattaccctgagatgagatgattacaaaaagggataaaatgtaacattctctttatattcttaatggttcttatatagcttctcccatatttaggtatagattgtatataaattaggtttcaaattcttttaaactgagttccatacacagaagggtagtcttgaagaatcaatgactgttcagaggaaatactttgtttcctaaattttccctcagtctgtcttttcacagagaaagatgagacttaacttacaagtctttcatgttgcgtctttatctgtttataaacttcccaggcttcttctaaaaggaagtacaaaaaaatcataattgaaaaagttaatataatatatagtgcctggcatgtaataagcgtccaataaattaggttatcattatcatcaacataatatcactaacacctttgaagtttcccattattaatataatttcagaaatgtattactgtaaaatagattcttttttttttttgagatggaatttcgctcttgttgcccaggctggagggcaatggcgcgattttggctcaccgcaacctctgccttccaggttcaagcaattctcctgcctcagcctcccgagtagctgggactacaggagcccgccaccatgcctggctaatttttgtatttttagtagaggcaaggtttctc[131 bp omitted]tcattataaaataaagttcaaatacaaataacattcccaggtatgtgtaattttaattgcttttcaatgtaacccagcacacttcataaatcagtaaaatgagagaaaataaggctaggtatggtggttcacacctataatcccagcactttggaagggtgaggcaggaaaattgcttgaggccaggagtttgagagcagccttggtaacacagcgagactctcgtctctataaaaaatttaaaaactagccaggcatggtgcctgtagtcctagctactgaggagattgaggtgggcagattgcttaggcccaggatttcagggctgcaataagctatgatcgtgccagtgtctgggtgacagtgcaagactcggtcttttattttatttttttgggtcggagtcttgctctgtcgcccaggctggagcgcagtggcatgatctcggctcactgcaagctccgcctcctgggttcacgccattctcctgcctcagcttactgagcagctgggactacaggcgcccaccaccatgccctgccaattttttgtatttttagtagaaacggggtttcacca[136 bp omitted]gatgaaaggacaaatacttaaaagactgggagtgcataggaagacagggcaaaaataaaatgaacagaaaagtttaaataaggtgcttatttctatgtcttcccgaaacaccattaaaatgacagtaaaagggtgaagaaggacacataagaactaaacggttaagaagatatcagtggacaaaaagtattaggaggactagggatagtggctccttcctgtaatctcagcactttgggaggccaaggcaggaggactgcttgaggccaggagtttgagatcagcctaagcagcacagcaaggctttatctctacaaaaattttaaaaattaggtaggtgcagtagcatacacctgtagtcttagttacttgggaggttgaagtaggaggatcgcttgagcccaggagttcgaggctgcagtatgctatgatcatgccattgcaatccagcctaggtgacagagtatgaccttgtctctaaaaaaaaaaaagtattaggaaattttggaaagaaagcaaatagagaactgtaaattaacagcagaactgagtggtttaaagaaaagccagcagatgtgggggccaccttcacaggtctgtaacacagatattgacagatatgctctgtcagtggagaaactgggcaagagtggaaggcagggcttacaaaatgactgtgaaaggaccagctaatgccctgaactctcctagctggacagaaatgtgaagtttatcatccagacaaaaccaagaggctccaaatttagtgatgaccagcaaagtaatgagagcatcctagtaagagaagaatgagtaaaagtttatacacataacagaggctcttctactgttagagtccgagaatgctggtggttactagctgtcagatgatggaagaattattttcttttttctttctttctttttttttttttgggacggagtctcgctctgttgcccaggctggagtgcagtgcgatctcggctcactgcaacctctgcctcccgggtgaagggattctccggcatcagcctcccgagtagctgggattacaggtgcccgccaccacgctcggctaatttttgtatttttagttagagacggggcttcaccatgttggccaggctggtcttgaactcctgacctcatgatccacccgccttggcctcccaaagtgctgggaatacagccatgagccaccgcacccggcccggaagaattattttctgaaaaaatgagaagaccatgagaacacctacagatgctaacatttggaatcatctaacgaaacacatctatattactgattgatgcacagtgaaaaccaccatttcataagccccgcttacatacacaaattaatatagagctaaagatcagaaaacatttgatgaaagtcctaacatcaaaggcagatcaaacaaaatacaaggcaaagagcagaaaaactcacccatataatactacaattaatatcatggaaagttaggagattactattatcactgcaatgaaatattaacagtgttctataaagaggtgtttttagaaataaacaatatgaaattgatcttaaaaattcagtatgttggggaaagaaagtctagaaaatctcctagaataaaaaaaggaagaatggaggaaggcagaaagaaagagtgtaatggttggaacatttagtgggttagtggaagaatctggaaggatcagcatctactaaagaagttccaaagaaagtatgaagaaaaatgaatacaggacattttcaaagagctaataaagaacacttcccagaattacaaatcatgagtccacatacttagcaggcccattgagtacaaagaacattccatttaaaaagatagcggcgaaagcacatcaatacaaaatttcacctagggataaaaagaggatcctagtttgagaccggcctgtgcaacacagtgtgatcttgtctctactaaaaataaaaaagattatctgggtgtggtggcatatacatgtactcccttctacttggggaggctgagatggtacgatggcttgagcccaggagagtgagctatgattaccctactgaactccggcttgggcaagagtgagaccttgtcttaacaaaaaaaaaaaatcctaaatgttccaaaacatttatcctataaaaggaaataaaagaaaaagacataccacatcaaaaaggcatcagattgcaagacaatggataatcctaaccataagttacttccaacttagacttctaggttttacagttctgtctgaaagcttgggaagaatcaaaacacaaaaatggaaaactaagcaaacaaaacaaagaagcaaatattaattaaaagaaaagcaaaaggttatacaagaaatcaaacagagtcatagaaaatcatttggtttaccagtcaacaatgcttacagtgttatagttacgtaaatgcttacaaatgctttaataaaaaagcagtgatcttactagtatcagaagtcagaaggggaagtatgggtataacatactgggggtaacatttcagaaccccgttagtaactgagaaaacaaccactctcaacctctgaattcaaatccataaaatacaatataaataaaaagaaaaatgtatacacatttataacatattttattaatcagtttatcctatatcttgaaaatagattataaaccacctttttaaatgcccaaagaacattctgaaaatcagcccatacagtagcctgttccacaaagtagtaaaggatggacaaaatactctgaccaaaaaaacaaaaaacccaacacatagaaatgacagaacaaaaacaaaacctttcacttgtaaatttcaaaatctattggtttgaacaaaccctttggccagggaaaattaatgcttggagaatgaagttttagcataaaagcttacatcattttaaaaaaagtaataaaataagcactcaaagt[132 bp omitted]catggagaaaccccatctctactaaaaatacaaaattagccgggtgtggtggtgtgcgcctgtaatcccagctactcgggaggctgaggcaggagaaatgcttgaacccaggaggaggaagttgcagtgaaccaatattgtgccactgcactccagcctgggcaacagagtgagactctgtctcaaaaaaaaaaaaaaaagaaagaaagaaaaaggaaagaaaaacagaaaattagtaaaaataggaaaaagaaattaatgtattacaaacagaaaaagagaaataataaattcatgagtggattcttaaggaaaaacttaaaagaagtaagagtaaaaaagaaaaagatatttggaaataactatagatagaaaatatggatagtacagactattttgttaaaccccatgcaaatagaaaacttagcaagtataaccgatgcgaactgaaaccagaaaagacagaaaacctaaacagaaacataaacatagtacaaaatagggctgggtgtggtggctcacgcctgtaatcccagaactttagaaggctaaggcaggtggatcatttgagcccagcagttcaagaccagcactttgggaggccaaggcaggcagatcacaaggtcaggagatcgagaccactctggctaacatggtgaaaccccgtctgtactaaaaagacaaaaacaaaaaaaattagctaggcgtggtggcgggcgcctgtagtcccagctactctggaggctgaggcagaagaattacttgaacctgggaggcagaggttgcagtgagctgagatcgccccactgcaccccagcctgggtgacagagcgagattccgtctcaaaaaaaaaaaaaaaaaaaaaggaccagcctggccaacaccgtgagaccctgtctctacaaacaatttaaaaattaggtgggcgtagtggcaggtgcctgtagtcccagctgctcagaaggttgaggtaggaggattacttgagtcaggagttcaaggctgcagtgagctgtgatcatgccactgcactccagcctgggagacagagtaagaccttgtctcaaaaaaaaaaaaaagaaagaaagaaggaaaaaatagagctcttgccccttaaagcccaaggcatggatggcttagcatgtgaattttactaaactttgattagataatggtattatttattttgttttccacttacttttaaaaaattcatgaaaattggtatgatgcataacagatcaggacttatgctactatattccaaacaatccaaaagaaaattaaaaattacatctcctttgtaattaaaaccctacatccttcacacacttatcagaattgaatttttaacactgtaaatgacaatgctgaactgaactagaaaacataatcagaacaacaagtaaaatggttctttcaacatttatcccatggtttaaaaaatattctcaggaccaggtgcagtggcacacgcctgtaatcccagcacttggggaggatgaggcaggcagatcacctgaggtcaggagttcgagaccagtctggccaacatggtgaaactctgtctctactaaaaatacaaaaattagccaggcatggtggtgggcatctgtaaattccagctactcaggaggctgaggcaaaagaatcgcttgaacccgggaggcagacattgtagtgagccaagattgtgccactgcactccag[138 bp omitted]atggtgaaaccccgtctctactaaaaatacaaaaaattagctatgcttggtggtgggcgcctgttatcccagctacttgggaggatgaggcagcagaatcgcttgaacctgggaggcagagcttgcagtgagccgagatcgcgccactgcactccagcccaggtgacagtgtgagacttcatctcaaacaaataaaaaaaataaaataaaatgaaaaatgctttcaaaatataagtcaaaatgctctaatggcaagcaaactcttaat[138 bp omitted]catagtgaaaccctgtctctactagaaatacaaaaaattagctgggcgtggtgacatgttcctgtaatgccagctacacaggaggtggaggcaggagaatcgcttgaacctgggagatggaggttgtagtgagccgagatcacaccattgcactctggcctaggcaacaagagtgaaactccatctcaaaaaataaataaataaataaaataaaaaaaaacaccacaaggttggcaaactaaaagagtttttctggaacatggccatgtttatttattttcttgtccatgactactttcacagtataatgcttgagataagtagctgcaatggagaccctgtagcctacaaagacttaaatattaaccatctggccctttacagaaaaagcttgctgaactcctgtcctagagtagcaattcctccatcttctatctggctgaaaccaggttgcattgttgatccagctccaaccacaaccagataataaagagagaacctcggaggaatccatatgtttcagggaccataagcaccaaagttagcatgcaaatctggactattcaccacatgagtgttatgtgaccaagaaatcaattcctacattccttaaactggcactttgaagtttattatagtcacttagctttactgtgattagtacacttcttattgctttacatatcatgaatctgagatgcctaacaaatactaatcaccagcctggacctctctcctcaacaatcaattcaaatatccagctgactactcaacatttccacttggatgtctaatagtgatctaacttaccctgcccctattcaaactcttgctccagctcccaaaccaactcctctcaaattcttctcatctctttaaatagcaatctcattctccttgctgctcaaacaatacttctctttcagtcagattgcacactctttacaacctcgtagcttactggctattttggacaatcctcactgtgaccaccaaggtctaagccacatgtcttgccaggattatttaacagcctccttaccagtcttgctactttagctttcaactctttacagttctcaacacagcagccacagtaatcttgtcacagtccaatcacatcactgctctacttgaaagcctttttgtatcctcataaaaacatttagaagcatacagcagacactgttaacagtggctgcttctgggaaacaggggattgagggccaggaatgaagagacatacctgattgttttaattttctatcaagtatacatattaaattttgataataatagtattatttctttttttttttttttttgagatgggagtctcactctgtcgcccagactggagtgcagtggcatgatctcggctcactgcaacctccgcctcccaggttcaagtgattcttctgcctcaggctcctgagtagctgggattacaggcgtgtgccacctcgccaggctaatttttgtatttttagtagagactgggtttcac[132 bp omitted]gaactaataggaagtcagcactaatccctaagcctgtaatattgttaaaaagcaggaggtgacatagtgttgaactatgatggctggaggtaggaagacaatagaaaacaagagtaaggaagcaaaattcaattctgaggaatataacaatggaaggagaaagaatgatagaaagttaaaatgtaaagaaaagaatctacttgctagtctttgaaagtttttttattgatacataatagttatacatagaatgattaatttattttatttattattattattttttagacagagtctcactctgttgcccaggctggagtgcactggcacaatctcagctcactgcaagttccacctcccaggttcacgccattctcccacctcagcctcctgagtagctggaactacaggcgcccgccaccacacctggctaattttgtttttgtatttttagtaaagacggggtttcaccg[137 bp omitted]ttttttttttttttttattgatcattcttgggtgtttctcgcagagggggatttggcagggtcataggacaatagtggagggaaggtcagtagataaacaagtgaacaaaggtctctggttttcctaggcagaggaccctgcggccttccgcagtgtttgtgtccctgggtacttaagattagggagtggtgatgactcttaacgacatgctagtttttgaaaactaacagatctatgaaggactgaatgcttaaggaaacgcatctaggcatacagggaaaagtgaaaaatggagaatgttagtgaaaggaagaaaagtgaaattgaggctgtaaaaaaatcataaaattgaggctgcaaatgatgtagaatgactggcatccagaatagattttagaagagcaatcagtcctctagaatctgataaaagggatgcatagattcaggaagacagtctggaaatgtcatttaggtatctaaagaattcccagcaacagtcactctaaaagacaaaggctagtacgaaaatctcaaaaaaacaaacaaacaaacaaacaaaaaaaccccacaacaactcagaggctgcaaattctcactgaataactgcaataagtctttatctcattcatacctaccaggttcttgcttactcacacaaagagaaccttctttacatttctttctcaatcatctgttgctgttcttttaagtgctgactttaaacttgtgagcagaaaaatgacactggacttggatgttatggttggggaacaaagcagcatcccaaaattcagggagcgcccttagaactctaagaggttttgcagctcctgtggatatacaaggaagcaggcctgtgaaaaagaacaaagtaatgatgattctttggctttgacctacatgtgagcaaatggaaaaacagtatttgtacatagcacctcaggccagacccattatgccattcaaaagctctacacatttcaatggccgggcatggaagctcacgtctgtaatctcagcaccttgggaggccgaggcaggcagatcacttgagattaggagttcgagacccgcctggccaacatggtgaaaccctgtctctactaaaaatacaaaaattagccaggcgtggtggcatatgcctgtagtcccagctactcaggaggctgaggcaagagaatcacttgaagccaggaggcagaggttgcactgaaccaaggtcacgccactatacaccagcctaagcgacagtggagactccatctcaaggaaggaaaaaaaaaaaaaagctctaaacatttcaaaaatgagaaacagaagggaccttattttcagaatttaggttacacagagaaactatgagagactaagatgccagagttatccacaatcacaacctgtataggttccttcgagcaggtgtcacttgtgaccttgctcctgagtgaagtcacatctttgcatataatttttccccataacacttttctcataagtctgaagtaaccaaccttgagtgatatggaaaaaaatacaggaaattattctgatggtatttataggtcagagctctaaaaaatttagaggactaatattttacttagattaactaggagaagttaaatatagtaagtgtcctataataataatcttcccttgatatcacaggagattggttccaggatcactgtggatacca[141 bp omitted]gtgaaaccctgtctctactaaaaataaaaaaattagctgggcatggtggcacacacctgtacctcagctacttgggaggctgaggcaggagaatcgcttgaacccaggaggcagaggtggcagtgagccgagattgcaccactgcactccagtctgggtgacagagtgagactccatctcaaaaaaataaaaataaagtgaatggaagtatatttacatataacctatgcacatcctcccatatactttaaaattatctccagattacttatcatacgtaatacaacgtaaatgtctggtaaatagttgttatactgtattgtttagggaatcatgacaagaaaaaaaaatctgtacacgtacagatacaaccatcgcaagcttaacaacagttatgattcatgtttgttgaatccgtggaagcagagcctacagacacagagggctgactgttcattcactgattcagcaaacatatacatttatgattatgtgtgctgagaaaccttggtttacaatttgtaatgggatataacaaatcaaaggatcaaacttacttagaagccttctctaagatgtaagtgccttagaacctggctagacagtgctataaattgctgaaacaggtacagaggggaaatagatggaggcagactgcaggaagaaggagccctttagacataaagagcttgaagttccctgtaacttccaggtggactgcacattgggcaattagataatatggattaggagctcaggacaagcctccagcagaaacagacatttattagtcatctgtattagatgaagccatggatggcagtgtaatgttgttgctgataggagtacttagatgatcaaggccagaaacttagaaacaccaatagttaggggaaaagcagaaactaagtcctgtcttctttgtatcttttactttttctgtatatttcaaaactattaaccctgttacttttttattttattgaaaaatatgttaagaataagtgtgacaagatacttgaatatgttgatatgttaagaataagtgtgacaagatacttgaagataggatacttctatctttgtatacacaagaaaagaatttcccctatatttacaaaaggctggggaaaccctgattaaattaggagtgagattgctgccctcactgacgaactagggagtttcttgacctctgcgctaaaggcaggacaagtagcttccaaattctgtgccgtctgcgctattggaaactacctcttaaagatattccttagttcagggtttctccaagcaactgcaccaaagtttctccaaagtattaagaaaagtcaatgcctactgggtgtacaggcacccagtaacaagtttttccgaaatcttgcctctttaaaaaaataatggaaaggtaatgctgattttgttttctactccacaataggtctgcttttatataaaaaatcacctttaaaattacttatccgctcaattccttagccttttccgtttcctattttccagaaaacgcatctttattattttagaaatgagaaaagtgaggcttagaggttactacctcacaaagccatccgtccatcctcacaaacttggaaccagtttctcactaactctgcaccctcaacaccccctcacactctcggtcacccacccgcgaacccacccgaactgtacccctgcccccagccacacaagctcggatcaccgcacatcatagaaggcgattcctcccctccatactcccagccccgtcgcaggcactgcaaatcctcccctccagcgtccctggcccgtttcagtgtccagaaacccaagtcccacagggccgaaacccaactcaccggcagacaaagacgaccatggcaagtcggagattccgcgcctgcgcactccttccgcgggcagcgctcccagaggtctcctgggctgggccaggccccgactcagaaccggacggaatcgagagatcttggcccgtcctccgtgccactcttttgagggtagactacatttcccagaaggttcagcggtttgagtcagcttttcgcgcgaacttttcctccgccagagcttgtgggactgtctccctggccggggcaggggtgtaaggccttagtcttagtttactctatccctgggattgggtagtggtgtaacatcagcttaaacacgctgtgctgactttatgtaacagccacggtgcgatactaagccaggaaccccaggagactctcagacacggttcgggaatgagggtaatccctttggctgggctcaagccgggcgccatcttgctcatcgcgggcgtggcgctgaactacatttcccagaaggcgccgcgccctcggcccctcccctcgcgactcccgcggctcgggggagagctgcacgcgacccaggtgctggcctctgagcgggtcggctcggagactacaggatcaggaggaggttggaggtgaagcgtctggaatccggtgcggaggttgagactgagtattaagtctgttcaggcggaacgcgccgagaagggcggttgtgaaattgtgtttttgtgaatgtatgtcctagcacagtgtgtgtgtgattgtgattgtgtgtgacaccttgtgtacggatgtggggaggactctgcgggtgtcccgtgagtccctgtgttaggactgttattgtgtgactgtgtaacgctgtgtgagggtgtgggttagctgtgactgtgtgcccgcggtgggtgtgtgattgtaactctgtgaccatatgttcgtttgtgtgcagatatagggagctttgtacttatgtagttgtgactctgtgtccttgtgtgggagtatggagggtgggtgcttgtgactttgtgtacagtggtgggtgtgtgactgtgaagcattgggtgtgcgtggagttgagactgtgtttgtgtgtctttgaccaaatgtcacacatagtcatatgtgagagcagaagacagctcggccccgtgatagtaaaggggatttttctatgacactgagttttgagttggaagccccagtttcctctgatagccctcccatggcgggggaggggaacgcagagtaagctctggccttgtcatttgggccctaggggaggtgtattgtctcccttctcatttctgtcctccaagagaggttccccagaggagaggaaataacggttgtgatatctaaaagccatgtttaaggtgccttgaagttttctctttgttcctgaaatgctttatttttccaggacctgattttttttttttttgagatggagtctcgcactgtcgcccgggctggtgtgcagtggcgcgatctcggctcactgcaacctccgcctcccaggttcaagcgattctccttcctcagcctaccgagtagctaggattacaggtgccggccaccacgcccgggtaatttttttgttgttgtatttttagtagagacggggcttcactatgttggcctggcttgtcttgaactcctaaccttgtgaaccgtccacctcggcctcccaaagtgctgggattacaggcatgagccactgcgcccggctgattttttttttcttagcaaatgcctaaaaggacttatcaagtaacctggaatcttctgttactctttggaaaaatcttcctaattttgtcttattaatatagcaaatggttcagtttatcatgtatgcttagtttggttttacctatatacatatgtagatatatatgcatatacataaatatacatacacatatttgtatatgcacatattgaaatgtatctcatgttttaagtgatattttaacttcctacataattgaaagctatttgagaatatattaaattgtagatactgttaattgttttgccacatatgtggctaacccaatatccattcccttctttattgctataaaagtcctgatcttgtttgctctgcttaaagaaaaacaaacagaaaacaaacaaaaaacccaaactctacgtgttctagcttctcctgttgatgtaagttaaagttcttagattgggcttctcagacagtttttttttttttgaaatggagtcttcactcagtcacccaagttggagtgcagtagcgtgatctcagctcactgcaaccttcacctcccgggttcaagcggttctcctgcctcaggctcctgagtagctgggattacaggcgactgccaccatgcccggctaatttttgtgtttttagtagagatgaggtttccaccatgttggccaggctggtctcgaactcctgacctcaggtgatctgcctgcctaggcctcccaaagtgctgggattacaggcatgagctactgcacctggccactcaggcagttctttaaaggtatggggatggggtggggcaggctcagtgtgcatacattctttttcccctttctgtctggaatgtggatattgtgctacatgcagagcagctatctcataaccatgcatttttttttttttttttttgagacagaaacttgctctgttgcccagtctggagtgcggtggcgcaatctcagctcactgcaacctctgcctattgagttcaagtgatgctcctgcctcagcctcctgagtagctgggactacaggcgtgcaccaccatgcctggctaatttttgtatttttagaagagatggggtttcaccatgttggccaggctggtctcaaactcctgacctcaggtgatccgtctgcctcggcctcccaaagtgctgggattacaggtgtgagccaccatgcccggccataaccatgcatttataatggaaggaaggagatgagagtttacaatgtcatattaaatgaaaatagaggattttaagttatatatgttgtgtgaaagcaatttgattagaagatatgtatattctacctatctatgcatgaaatgtgtagttgcactttaattttcttcattgtaactagactcaagcttgtgaaagaagggacttgtctttttgtttagttgttccatcttcaccatttacaatggctagcacatagttggctctcagtaaatatttgattaatgaaagaatagtaagtagttaataaatgatagcagtgctacttagtttctttttggttgcacagaggaaacatgcccagattgccttaggtttctgttactctctgagattactctgtgttaactctacctctggggtagtgaagaggtatgccaaggggtgttataagccaacattcttcagactgggtataagttcttcatcatccataggacttttgatgttgggcgaaagatattcactgctttgattatttattgttttctttgattatttattaagtttctgtaaagcataaaatataaccaatttttctcacatttaaacttgattattaattttgattaatatatatttcttttttttttttttttttttttgagacagagtcttgctctgttgcccatgctggagtgtagtggcacactctcggctcactgcaacttccacctcctgggtgcaagcgagtctcctgccttagcctcctgagtagctgggattacaggtgcacaccaccacgcctggctaattttttgtatttttagtagagacggagtttcaccatgttggccaggctggtctcgaactcctgacctcaagcaatccgcccaccttggcctcccaaagggctgggattacaggaatgagccaccgcacccagccaattctttttttttttttttttttttgagacggagtctcactctgtcgtccaggctggcgtgcagtggcactgtctcggctcactgcaacctctgtgtcccaggttcaagcgattctcctgcctcagcctcccgagtagctgagattacaggtgcccaccaccactcccggctaaatttgtatttttagtagagatggggtttcgccatattggccaggctggtctcgaactcctgacctcaagtgatctgcctgccttggcctcccaaagtgctgggattacaggcatgagtcaccgcacctggccagatttggattcttaaatgccaattgagttcttaacagggaaatactagaagcatttccgttacataaggaaagagacaagaatatatgtatcaccattactatttaactttttttttttttcttgagattgagttttgctcttgttgcccaggctggagtgcaaagatgcgatctcggctcaccacaacctctgcctcccaggttcaagggattctcctgcctcagcctcccgagtagctaggattacaggcttgcgccaccatgcctggctaattttgtatgtgtatcagagacagggtttctccatgttgatcaggctggtctccaactcctgacctcaggtggtccacctgccttggcctcccaaagtgctggggttacaggcttgagccaccgcacccggcccttaacttttttttttttttttaagagatgcttggtagagtaattaaacaagtaaaaagattcagaggcaaaaaaattctgaaaagaggaaataacaatgacattaaatgcataattccataggaagtatgtctggaagataaatgtttatgtatatatttttaatcaccctctgaacctgaacttgagttaatcagactcatttatcactaatctttaaaagggctctattgatctgtttccaacaccatactctacttccattctccttctgctgtagacacattcaaaatgattaatttgttggacgcggtggctcacgcctgtaatcctagcactttgggaggatgaggcaggcggatcacctgagttcaggagtttgagaccagcccatccaacatggcaaaacccccatctctaccaaaaatacaaaattagccaggcgtggtcgtgcacacctgtaatcccagctactcgggaggctgaggcaggagaactgcttgaacctgggagatggaggttcccgtgatcgaggtcatggcattgcaatccagcctggatgactgagtgagactccaactcaaaaaaaaaaaaaaaaaaagattaattttatctttatgcttgaaaatgttcttacaaagcatatattttacatacgtgtattaaatatatatatatataaatgtctcctgttctttttcagtaatcatagtgtttttacaattatctgttactatgtaaacatttatttcaaggcattggtcacgttacctacctactcttccagggaatggacatgcagattgccttcataccctcccaccacaggaaatgctgaaattaataatctcatacatatccctttatgggccagtttgagaatttcttaggtcacagaatttctgggtcataggatatgagtttacttgactaagtggtgccagattctctccggattggttgtaggagtccagactcccaccagtatggaatgagagtttccatatcccacatctgtatgaacacagcactgtgtagctgtctcatagttatcagtctaaaaggtataaagtagtatttctttgtagtattaatgtgcatttctcattgccagtgattttgaatagcttttatgcttgttagctttttcagcttgtttgtaaattgccttttgtaccttttgttaaaatgtaattgggattagtctttttcttgttaatttgcaaatgtttatgttttctagatattaactctctgatagttttagactctgctgataccctcttatgtattattatactttttattaaacagaaatacttattttaatattattgttatgtgtttgtgtatatg[137 bp omitted]catggtgaaaccccatctctactaaaaatacaaaaattaatcgggcgtggtggcgggtgcctataatcccagctactcaggaggttgagtcaggagaatttcttgaacctaggagacggaggttgcagtgagccaagatcgtgccactgcactccagcctgggcaacaagagcaaaactctgtctcaaaaaagagagaaaaaaaaaagaaacatttttcttctctaaggtcacaaagaaattcttctacatttttgtctcttgactttgtagttctaccttacacagttaggtctttaacctattccagagtaaaattttgtattttcaaaaaaaaaactattctcccataattgtctctttcagcccttctctgtgagatggtattttttcctgcctctggatgaaatgtctgtcaagtgtcattatagtcattcttaagtaataaaaaatccagtagacaagatcagccttaatttgctaaatgaaatacctggtatattacaataattagtactctgaactgtttaaaattaagacttcttcctacaactgaatcttaggtaaagatggacacctgcatgagggaaggaatatgtgagcagcttccatttcccttccatggtcttctcagcttcctccaacagtagattgttcagcctccctaaagcaggagaagaggaaggggaagaaaggtaagagacagtaaaggtcttacttaactggtattgttataatcagtgtttggttctctcctgccttcatggatagtcaaagctgaccctttttcttattgttaggtgtttttccgggtttctaagcaaataccttgctgcagatcttcaactgcaggggagggcatgttgccagaacatcctgtttacagaggccacttaaaatccttacgttaaccctaggcatactgtggtcatccttttctggtgggtcacattggccctccagaagttctctagaacaggatccaagatctcctgaggtcagctcactccgtatggtccatatcctgtcaccacgtgggaattaagttcctatctctgtttctcctaaatggcaggaaaaaaggtaaagttctcctaagaactctcttaacacactcccctttggatcttagagggactgggatggatcgggtcaacttgcttggtttgattagaggaggaaacacccacctcctttcctcagggtgctgagaacacacccacagctcttcccaaaaatagtctcacctcacaaaaagtcctcttcctcagcctccccagcctctcacatgtccttgaggtatgttgaactgtagcaaaaattgtttatagccagtttcttttttttaattttaattttttaaaatatggtcagctgggcgcagtggctgcctgtaaccccagcaatttgggagggtgaggcgtgcgaatcacctgaggtcaggagttcgagaccagcctgaccaacatggagaaaccccatctctactaaaaatacaaaattaaccaggcatggtggcacatgcctgtaatcccagctactcaggaggctgaggcaggagaattgcttgaaccccggaggcagcggttgcagtgagctgagatcgtgccattgcactccagcctggatgacaagtctcaaaaaaaaaaaagaaaagaaaagaaaaaaaaagatagggtcttgctctgtactccaggcaaccttggctcactgcagcctcaacctcctggactcaagtagtcctcccacctcagcctcctgagtagctgggactacaagcacatgtcaccacatctggctaatttttatagttttttcctagacggcacccggcctagaaagcaattttaaacaatgagaaatttcaagaaggtgactggatataaaatatgccaaaatagtacacataatgtatatgatatacatatatatatgaaaacaacaaatagaagattcaattgagaaagttttaaaagaccccagcaatgatagacataaaaatatgttactaaggaataaaattagcaagaattggtataccttatgaagagaacttgaatatggagggactaatcagaaaacaagtgaaaaagcatagtataggatgcctcaaactcctaagggtttaaaacttaatttgtaataatttaatgtgatcccaatctgataattattttattaataaattaataattgttttattaaagacaagttaattctgaagttcatgtggaaaagtcaatatggcagaatagccaggaaaattctgaaaaagagtaattcagaacatttactctaccatatgtttaaacataaaataatagccttggctgggtgtggtggtttatacctgtaatcactaaaagcacttcgagaggctgaggtagatggatcatttgagcccaggagtttgagaccagcctgggcaacataatgaaacaccatctctacaaaaaatacagaaattagctgggtatgttgacacatgcatatagtctcagccatcctcccaaatgctttgggaggctaaggcgggaggatggcttgagcctgggaggtcaagactgcagtgagctgtgattgtactactgaatttcaccctgggtgacagagtgagaccgtctcaaaataaaataaaataaaataaaataaaataaaataaaataaaagtcttaaaatagcatggttctgacagatgagcagacggatcagtggagtggaagagaaactccagacccagtaggtagtgcagtattcttcatatggtaaagacagcatttctaattaggggcacacatatggatttagtacttcgtttataatatacaactgtatattgtaaccattgtagaggggaagaaaataggtcgttaacatttcatatctattattccaagtggatcagagattcaaatgtgaaatatgaaatcataaaaattctcgaaataatgtggaaaaaatgttagcctcaggacatggaaatcattctaagtctaacacaaatcctagaacccataattgaaaataataataaatttttttttttttgagacagagtgtcgctctgttgcccaggctggagtgcagtggtgcgatctcggctcactgcaagctccgcctcccgggtgcacgccattctcccacctcagcctccggagtagctggcactacaggcgcccgtcaccacgccggctaattttttgtatttttagtagagatggggtttcaccatgttagccaggatggtctcgatctcctgacctcgtgatccacccacctcggcctcccaaagtgctgggattacaggtgtgagccaccacgcccggcctaaattaatttttttacttggcaaaaactattaatgctaaaattccaaaagataattgatagcctgggaaaacttacctgcaacatatatcccagaaaaagttaattttaatgaaatgaaagtactgcatatctaataaggaggaaaaataatcaaaaagaaaataagcaagggatacagagatggttcatagaaaaggaacaaaaaatcgccttttggtatgcatgttttcatctgtttggactatcataacaaaatatcacaaactgagtagcttaaaaaacataaatttattttcttatagttttgaaggctggaagttcaagataggggtgccagtacagttgatttctggtgaagggctgtcttcctgacttgtagatggccacttgctttttgtgtcttgacatggctgttattccgcatgtgggaggagagaaagaaatctctggtgtctcttcctcttcttgtaagaacactatcagattaggttcccacacttacaactttcatttaagcttaatatctccttaaaggtcctatctccaaatccagttccatcagtcattagggctttaacatgaaatacgggtagacacatttcagggtacaataatgtgaaaagataattatcctcgctgataggaataaaatataaattaaacctacaatttttacctagtaaaagtttaatgtgaactagattttttcagatgtaaggccaggtgtggtgactcatgcctgtaatcccagcactttgggaggccaagtgggcagatcatttgaggtcaggagttcgagaccaacctggccaacatgatgaacctctgtctatagtaaaaatacaaaaattagccgggagtggtggcatgtacttgtagtctcagctactcaggaggctgaggcaggagaatcacatgaacccaggaagagaggttgcagtgagctgagatcatgccactgcattccagccaccttttttccccaatagtgatatggttcaggtctgtgtacccacccacatctcatgtcaaattgtaatccccagtgttggaggtggggcctggtgggaggtgattggatcatggggtcagatttcctccttggtgctgctttcatgatactgagtgaatgcttgtgagatttggttgtttaaaagtgtggcacgtccccactctgtcttcttcctggtttggccacgaaagacgtgcgtgctttcccttcaccttctgccatgatttaagtttcctgaggcctcccgagccatgcttcctgtcgagccatgagccaattaaatctcttttctttataaattacccagtctcaggtatttatttatagcagcgtgaagaatgaagtaatacaaatggcttttgaggtacatgtggtttttggttatgtggatgaattgtatagtggtaaagtttaagattttaactttcgcggtggctaacgcctgtaatcccagtactttgggaggccgaggcaggtggatcacgagatcaggagattgagaccatcctggctaacatggtgaaaccctgtctctactaaaaatacaaaaaattagccaggcatggtggcgggcacctgtagtcccagctacttgggaggctgaggcaggagaatggtgtgaggcggaggcggagcttgcagtgagtctagatagcaccactgcactccaggcacttgtaacagagcaagactccgtctcaaaaaaaaaaaaaaaaaaaagattttaactttttaagaaactgccaagttagaaaattaaagaaactagaaaagagcaactaaatccaaagcaagcaaaagaaaaacaataaagatcacaatggaaatcaaagaaacagaagacattaagacacatactagaaaatgtctgaaaccaaaaggtagttatttgaaaagataacttgacaagcaaacttgacaagcaaaaaagaacacaaattaccaaaatcagaaatgaaagaagggaaatcactatcaaaaacctacaaaatttaaactttatgctaacaaattaggcaaactagataaaagggaaacatttctggtaagtcataaactatgagaaccaactggaagaaatttcaaaacttgaatagacctataactaaaaaaggactttattaaaattttccatgaagaatagcccataaatagaaatctatgaaatatttaaagaaaaaataataccaatacttcacaaattctttcaggaaacagacaagggaaaggaaacaattctgaggtcatactatgaggccagtattaagcctataccaaaggcagattttaaatatcaaaagaaaggccaggtacagtggctcatgcctgtaatcccagcacgttgggagaccgaggcgggtggatcacgatatcagaagtttgtgaccagcctggccaacatgggaaaaccctgtctctactaaaaatacaaaaattagccgggcgtggtggcttgcaactgtagtctcagctactcaggaggctgaggcagaagaatcgcttgaacccaggaggcggaggttgcagtgagctgagacggtgccactgcactccagcctgggcgacagagactccatctcaaaataaataaataaaataaaataatacaaaaattagctgggtgtggtggcgggtgcctgtaattccagctacatgggaggctaaggcaggagaattccttgaacccaggaggtggaggttgcagtgagccaaaatcacaccactgcactccagcctgggcaacaagagcaagactccgtcttaaaaaaaaaaaaaaagtaaaaataaaataaaataaataaatatcaatagaaaaactgcagaccatgaactacagactctcatgaacacagacacaaaaatcctgaacaaggccgggcgcagtggctcacacttgtaatcccagcactttgcgaggccaaggcaggcaaattgcttgagcccacaagtttgagaccagcctgggacccatggtgaaaccctgtctctacaaaaagtaaaaaactagccaggcatggtggcgtcactgtagtaccagctactcaagaggctgaggtgagagcatcatctgaacccacggaggtcgaggctgcagtgagccacgatcgcgccattgtactctggtcttggcaacagtgtgagaccctgtctcaaaaaagaaaaaagtccttaacaacaacaaaaaacactgaaaaaaagcatctgacagaatcccaaacccattgataagctctcaacatacaaataagttgaaaatatatgatttcaatagacacaaaaaattatttgatacagtcccacatacatgcctgatttaaaacatttgaaatgctaggaatagaactaggaaaataaaggagtttcctcatcctgatgaaaggtattgtatcagtcaggcttgaataagacaagcagagtcaataagagatatatacatactgtatctatatattaagagatttattagaggggattggcttgtgcaattatgggggttggttaagcagtctctataagggtgtatctctctgatgctacagcttaaagtccaggcatggtacctggagtcctagctactcaggagactaagtcaagagggattgcttgagcccaggaggctgaagatgcagtgagctgtggttgtgccactgcattccagcctgggcaacagggtgagaccctgtctctaaaaataataatgaagtaaaaataaataatgtaaatgtttcatgcagaaatgaaaagatactagaaagtaacacaaagctacaggaagaaataaagaacactggtaaagataactacataactatgtatttacataggtaaatacaaaagccagcaatattgtatttttggcatgtattcccgtcttcttcctatatgatttaaaagaaaaatgtagctgggaatggtggctcatcctgtaatctcagcactttggtaggccaaggtggatggatcacttgagctcaggagttccaagaccaacctggagaaactgaaaccctgtctctacaaaaaatacaaaaattagctgggtgtggtagcaggcacctgtcgtcccagctcctcgggaggctgaggcaggagagtcgcttgaacccaggaggcagaggttgcaatgagccgagatcgcaccactgcactccagcccggatgagactcccatctaaaaaaaaaaaaaggtaactgcataaaacagtaattataagtctctgtaaatgggcacacaatgtttaaagatgtaattcctgtcaataataatataaatggggaaggacagagatgtataggaccagaatttttgtaaatattgaagctaagatagtattaattcaaagtagaatatgtgttaactccaaggcaaacactgagaaaatgaatacaaaatttacagaaaataaaataaaggaaccaaaatgatacagtaaaataaattcgggccaggcatggtggcttccgcctgtaagccccttgggaggctgaggcgggcggatcacttgaggtcaggagtttgagaccagcctgaccaacacagaaaaaccctgtctctactaaaaatacaacattagccggccgtggtggcacatgcctgtaatcccagctactcaggaggctgaggcaggagaattgcttgaacctgggaggtggaggttgctgcgagctgaggttgtgccattgcactccagcctgggcaacaagagcgaacaccatctcaaaaaaaaaaaagaaaaaagaaaaaattccattaaacacaaaaggtggcaatattgggagaattaagaaacaaaaagagacatacacaaaacaaattaaaatatggcagaagtcagtcctttacaagcaattaatttaaatgtatattgattaaactctccaattaaaaggcagagattgccagatggattaaaaaaaatgatccaactatatgctgtccataagagactcagtataaatcccaaactgtaaatagtttgaaagtgagaggagtggacaaagattccatgcaaatagttaagcaaaagagaggtagggtggctatgctagtatcaaacaaaatagactttaagtcaaaaatttttacaagggacaaaaaagacacattatatattgataaaacggtcaatgcatcaaaagatataatagttataaacacaaacacaccaaacagccccaaaagaagtgaagcaaacactacaaaaagttgcaggcaaaaaaaaaaagttctacaacagttggagtcttcaaaacttcacattcaataatggatggaacatctacacagaagatcaagaaggaaatagaaaactggaagattatcaactaacaacacctaacatgtacacaacactctaccccaaaacagcaaaatacacatttcctcatttttctcagtatggttaagaatttcccaaatcttcacattttagtttcttattgcttaagaattcctccttcaattcatctctctcctttcctgttttatatgcgcaataaagggaacccaagccacaagttcaataattagaaatctccgctactattcagttttcattggttggaagcgctaccttccacaaaacactagaacatgattcagccaagttccttgctacaataacctgtttctcatttctgagactaaaacattatggccttaaatgtccatatttctaccaacattttgttcatgattgtttctttaacatgaataccgttcatgacaggattctttaaaatggaagctttctctccagtggttctattttttttttttgtcctccccagaatcatttttacatccatatttctagcatctaccctcagcattcttctagcctatttgcccaccacccagttccaaagcttggacttgcacatttttagttttttgttatagcagcaccccacttctcagtaccaacaactgtcttagtttgcttagggtgttgtaagaaaatgccatagactgtgaggcttaaatacagatatttattttctcactgttctaattaaaatagggattagcaggtttaattcctggtaagggctctcttggcttctccttgtgtcctcatgtggactttcctttgtgtgtgagcataggaagagacgtctctccttcctcttctcataagatcaccatttgtatcaaattagaatcacattcttatgtcctcattgccctatgtccaaatacaatcacattgcaggttaaggggtgaattctggcaagttggagttggggtggggggtggcgcaggggttatataactccagaaatctcagtcacagactctttacctgtccctaacatacatatattagttgccattaaattgaattccttcaaggacatataaaatttaatggtgcaggacagcagaaaacaggatgagactgcaatatcctatcctattgaatatgagaataaagctcctatgcaggcttagagaaaagtcagaaagaataaaggggcaaatgaaaatggaaagaatggtgaagttttatgtttttgagtaaaaatagtaaaaaccaaacagtaataccaccaataataattatattatggtttcgagtaagtgtgaaatgccataagttcattacgaagttaagtgaaaaatgttaatatgataaaaatatagctgtaactacaaacaaggaaaacataataaggacacattttattcattaatttattatttgttaatgacttcaaaaagtaaaagccaagacacaaggatattttgtttctctcactaattttaatgtctgtatacaaggtttagatatttagttttaatttgtttaagctggaaggaaaaaaacacacacaaagaaatataggacaagttctcctggagaactatacccaaaagaggaacattagcactgatggtaactcaggataaaaagggagaatgagatccaagagtaaattagctgtgttgttacataaatagaatttagttagaaatagagctactactctatttcaaagatatgaaatagcaaatatcctgacaaaaaggttaacatactcttgttcttactgtgtaggacatgaaacaacaaccaattacatatcttttaaaactacttgaataagcaatacttacataaaacatagctcaatatatcagatgagaaaatggcttaatactggtaatcattcacaccgttatagagtacataaattctgggaaagacatcagtttcaaaaattaaaatgtaatgaatgacagtgacataaatttatctgaaaataatagtaaaattttcttataaaaatcaaataaccggacaggcgtggtggctcatgcctgtaatcccagcactttgggaggccgaggcagggggatcacaaggtcaggaaatcgagactgtcttggccaacgtggtgaaactccatatctactaaaatacaattagctgggcatggtggcgcatgcctgtaatcccagctacttggcaggctgaggcaggggaatcgcttgaacctgggaggtggaggttgcagtgatctgagatgacaccactgcactccggcctggtgacagagcaaggctctat[131 bp omitted]gagatatcccgtctctactaaaaatataaaattagccggtcatggtggcgcatgcctgtaatcccagctaatcaggaggctgagcaggagaatagcctgaacctgggaggcagaggttgaggtgagccaagactgcgccactgcactccagcctaggcaacaagagcaaaactctgtctaaaaaaaaagaaaaaaaatccaataaccagtggctcgtgatctcattgactgcataaccaagtcagcagtcctaagagagagatgattttggagttaaatgagattagttaaaccaaagaaggtctgctgattgttgaaatgcccaaacctagtaagtcaactctgagagggaataaaaagaaaaataatgataatagattaaaaaaacaattgaagccatgttaatatatagttgtaaattctcttaatgtaagttcagtggtcattttttctccccttttaaaggtgtttgacaaattttagagtgatactttaagagaatgataaattttaagagacttactgggtgagtagttttatcaaatatttaaaagagttctcttcatttggatcctggttggtatagcctgcaggtaaaaagactgcttaaaggaactggttatattccaatataacacacatacacactatatatatatagtgcccagtatatagtgtatatactatatatacatatattgtgtgtgtgtgtgtgtatatatatatatatatatagtgtgttatgtagtgcatgtgtgggcatatatagtatacatcacacacatatacatcacacactatatacacacatatagtatatgtgatatgtatagtatacatcacacatacactatatacactatatgtgtatatacactatatgtatatagtgtgtgtgtgtgtgtgtgtgtgttatggtggaatataaccagttcctatgtatgtgtttttttggggggaatatgttgtatcaaaataaagtagaaatttaaagagaagtcaacaattggatgaaaatggaaaggagatcacacttctatcatttaaaacaaaacaaaacaacattacacaaaatgatgagctgtaagactgtaaaaatacattgtatctgactaggagtgctaactctgtggaggaaaataagtaagtatagatatcacaagcaaagaattacaatgcagaaaagatattgaagtaatattacaattaaaaaactgaatagtcaaaagagcaataatacaaacatcaaaagctattgtaaacaaaacatgccaggatgagaaactcatgaaaaaaactttttaacataaaaaggagaaatatttggcaacatctaacaaagctataagtatatatcagctatgactaagcaattctacgtctacatacagaatgaccatgaagtctaaaaacagactttaagagagggagatactgaattgccttgattacctattaaatccatccacagtattttcctgtgaaaatcagaaataaaaaaccactttatacatttatttcagtcaaatgatttctcaccagtgtaaattttcggttggcaagtaagatgcccaacaacactaaaggaattcccacactccttacattcatagggtttatcatcagtatgaatgcgctgatgtttggtaaaggatgaactatgtctaaaggccttcccacatgccttgcattcatagggtttttctccagtatgaattctctgatgttctgtaagggctgaactatgtctaaaggccttcccacataccttacattcataaggtttctcaccactatgaattctttgatgttgaataagggctgacgtaagtctaaagaactttccacactccttacattcataaggtttttgaccactgtgaattctttcatgtcgagtaagttcactacctactccaaatgctttctcacattctttacatttatagggtttttcaccagtatgaatcctctgatgtctagtcagggatgaactatttctaaagacctttccacatgctttgcattcatagggtttcttaccagtatgaattctctgatgacgagcaagttctctacatactccaaaagccttcccacattccttacatgcataaggtttctcaccagtgtgaattctctgatgttcaatgagctgtgaactaattctaaaaaccttctcacagtgcatacatttgtagggtttctcaccagtatgaattctctgatgttcggtaagctgtgaatgaaatctgaagtccttgccacattccatacatttgtaagttttctcatcagtatggattttctgatgtcgagtaagttgtgcatgcactctaaaggatttcccacagaatgagcattcaaagtgtttctcaccatcatgaactctttgaagtggagtaacttttccaactctttcaaaggtccttctgtattccttacatttatagaacttctcattatgaattttctggtatacattaaagtctttataaaaactacatgtattcccatattccatatatttacaaggtttcacaccagtatgaatattcagttgtaacatactggagttatctatcccaaaggttttccaacattgattacattcatagttttttccaccagtatgtattttctgatattcatcaaactctaagtcacaactgaagaccttctcatattccttgtattcatagggcttctcactgtcatgagttctccgaggtaaagtaagagattcatgagttttgtaactgggcacattttcagagatgattttcatttgactgaaatatcccacttcaggtccttgtaagtcaatcttgcttttgctttgccagtcatttctgaaaatggaaccttcaaggccacataacttgctactttccattacctcccactgagaaccagtgttttgaataatatcttttcctacagataaatgcttagtctcattcctggactccaaatctgaaagaaaggaaaaaataattttcatgtactacaaaaataaaacagttatagaaagaagagacaatttaagaataattcaccatatacatgaattggttaaaatactgtcatgaaagataaagagagctcacagagtaacagcagaacataaagattatgaggattgtgataaaggtaacagattaagtcagtggatctgaaatttgtgtgttggtcatcacctggtaagctcattggttaaacagaatcaaaatctgtagatgtagaactagtcattagcatcttgtagaggtaatgctaacgcagatcaaaatttgataatccatatatactaacacttttgtggttttcctccccaaaaataaattttaccgaggataataacaaggtgcagtttgttaagacctcattttgcctgggcgtgttggctcatgcctgtaatcctagcactctgggagggcaaggtgggtgggttacctgagctcagaactttgtgaccagtgaaaccctgcctctactaaaatacaaacagctgggcgtgatggcatgcgcctgtagtcccagctacttgggaggctgaggcacaagaattgcttgaacccaggaggtggaggctgcagggagctgagattgcaccactgcactctagcctgggcagcagagcgagagtccgtctcaaaaaaaaccacctcattttaacgcattctcctaatcatttttcatctcctagatcaaaacaaatttcctatcatttagagctatccacaggacatttcatttcacatcaatggtctctttgtatgccagcttcttttctttgttaaagtctcaagataccctcagaaagggcatattagttgaccctaaataacttcatttctgtttctaatcccatatctagtgccttaccctcatatatatttttttcagttgtgtattcaatacttttctcttacaccatttacttccttattccttaaattccacaaggacaaatgtaataaattttcatgtgccaatgtataacaagacctaaggacatagtatatgataattaattagaggaaaagtaaatcactgtatgaatgaatctaaataaaaataaaagtatatatacaaagataagtcactagaaaacaataattatcaaaataattatgtaactataagaataatgccagttaccaatgcctcccaaccctcacattgtattagtgattacatatgtatatttataatacagtaagatacataaatatggcgaacattcatatgtatttattttccaactgcttctccacctacacatattgtccaccactattgcttattccctcttatgcagagccatgattgacatgtggaatgaagaaatacaatcgggatgtgttatttacttctcttcaacagcatatttacatttactccgccgtcctcctaaaaccttcctctattttttcttttatcttcttttacagatattcctttccattttcttatagcaaaagtcaactaatgctgtactttccaaaaatatatttcagatattaaaataatatctgaatataattataactactgttagacttacacagttctgagcaagggcttatgtgtgaaaaggagaatatgctaacagaatcatatgaagaaggtggtctaggtagacaagattggaaggcactttgtagcaaaggattttatggagatcatctggaggccaacagtgagagaagggaatgcctgaggaaaactcagagcaacacataaacactgcatgataaagggcaagaataattttctgtgacttaattatgtataagatgaaataatgcaggcatcaatatctgacgacaacattaaaaccagatttgagtgccagtatcagtaaatcaaaagaagtttcagttagaaataaagaagctctctactaggctgggtgcagtggctgtaacatctgtaatcccagcattttgagaggccaaggtgtgcggatcacttgaggtcagtagtttgagaacagcctggccaacatggcgaaaccccgtctgtactaaaaatacaaaaaaacttagctaggcacggtggcacatgcctgtaatcccagctacttgggaggctgaggcaggagaatcgctcaaacctgggagacggaggttgcagtgagctgagactgcgccaccacactccaggctgggcaacagagtgagactacgtcttaaaaaaaaaagaagctcactattaaataactgttgagtcaatgtggaaatgtaactgaaatcacaaagtttgtagagaaccatgatgttgaaaacatttctaactgacatctatggaacgcaaatacatttgtctcataaaaagtaaaaacttaaatgcttttttttaaaaaagtaaaaataaccaatgtataaagaacagtgacctaaagaaaaggtgaggaattagcaaacaatcactaggtgatgaaaacatacacaaaatgttattaagactcctatgctaataaagctgaaaatgtagactaatgaatgaatttcttggtaaaggaatatttaaaaccaacccaaaaagcaacaatagttggaaaaaaacaaattcctggaatgagataaaatgttcactcactccatgaaacagaaaaatcataaccatgacttattgtccttgttattgaaataaaccagataataagccaggaatcctagaacaaagacctgaatcatgatctggaccaggggaggtatgagatgtaacctgtaatgttttgccagaaagaaaaaagttttacaacagtgggtcacatcaaagggacacaaaaatagtttgcgggagctaaagtgccaccattttgacaatacaagagtcaaatgaggggaaaaaagtttatgtactgaaacatgctaaactaaacaaaaccagaaaaatgcactcatatccaattcaatgctgggtctgggatagggagggtatggaatgagccttggataagctttggacaaaaagtgagaataaattcaaaggttaaaggataaagccaaagcacacagaaatcaccataagaaacatggtatcagtatatcaaaatttcatccaatattcatacagctggacatcaaaaatcagactctggtgggctaatgtatactgaaccaataaaatcaataaacataatgagacttaatagaaggtatgaaaatttctagtgcaccatttgaggtggctacttacttacagtaatataaaagacatataataaaaaaagcctctttgcctttcctactagaattacaaaagtttaccaaagaacatgacagcaactaatatataaaaggaatgacaaattgaaacacactgattccaatgaggacttccaattgcaaaaacattaggtgaaccactgaaaaggaactgtgtatctataaaatgccaaattaagaccacagagattggtttctgaccacactgtctgaattagctctttctccatcacacaccatccctttattcttatacatatcactatatatgttctctacttatctgtttacttgtttattatacatctcaagaactagtatgtcaattccatgagagcagggtctgtattggtcttggtcaccattgtaccgatatctgtctcaatgtagacctgaataaatattgagaatatgaatgagcattttttttggtcaatatatacatacataagtctaaatacaagatgaactggaaaacagttggtggcactgaagatcttaatttcctccaagtgccaggcttttgtttctttttttaaaacaaacaaacaaaacacagtctgggctgggtgcagtggcttacacctgtaatcccaccactttgggaggccaaggcgggcagatcacgaggtcaggagattgagactatcctggctaacacggtgataccccatctctactaaaaatacaaaaaattagccgggcgtggtggcatgcgcctgtagtcccagctactcgggaggctgagacagaatggcatgaacccaggagacagaggttgcagcaagctgaaattgtgccactgcactccagcctgggtgacagagcgagactgtctcaaaaaaatcaataaataaaatcaacaacaacaacaacaacaacatcaaagtaaaaacccacaggcttttgaagggattttcccaacagaatcacaggggctaatctccctcctggaccagataggctttgtgctttggcaatgactttctatcactgattggccatcactcacctggccctgtcttctttcacatcccataaactctatagagcaacttcccttcctccagtaaggtgatcccaattggattagaaatggaagactgcttacaacaaagaaatgtaacaatgttttttttattatagccaatttttaaaatacagctttgagaattggctaaagttttactaaataaaatcaaaattatattgataaagatgtcagaaaagagaaatgtgagggaactggaaaaacattcaccttagagtaaccacagaattatcaagtataaagagactagacaggtaaagaaagctcttatgttatttaaacccatactaattctttgtctggagaagcagtataatagttaaaaaatactgtctttggtgccagattgcctgggtggaaagcctacctctgcaattaagtggctgtgtagccttgcagaagtacctaaatactctctgttgtaagcaacctcttctgtacaacaataatagaaatagcacttatatcacagagttattgtaagaattaaacaagtcctttttttatgagatggagtcttgccctgttgcccaggctggagtgcagtggcgcaatcttggctcactgcaacctctacctcccgagttcaagcgggttccagcaattctcctgcctcagcctcctgagtagctgggactacaggcacatgccaccatgcccagctgatttttttatattttagtagagatggggtttcaccgtgttgcccaggttggtcgcgaactcctgagctcaggcaatccacccaccacctcggcctcccaaagtgctgggattacaggcatgagccaccacgcccagccaagagtcaattatgtaaagtgcttaggatggggccaagtagaaggcaagaactatggaagctgagaggaaagttagtaactttctgagctattaaaaggtccttggtggaatactaatttaatgttaaatgtaaagttctttagccataaagcaggtgggaggaaatgaatatgaactctttatcaatccatcaatatataaattgtagagattcttttaacgattataacaaatcaggacacacagtatgttaaaagttctcccagaaggcaggtaagaatataaagtatttatagcaattctgacctcaaacacaatgtacaggttgtacatgccgaatctacaatctgaaattcagctacaaaatcctaaactttttgagcactgacatgatgctacaagtgaaatacacataactacttaacacaaactttgtttcatgcacaaaactattaaaaacattgtataaaattactttcagtctatgtgtataaagtgtacatgaaacataaatgaattttgtgtttcaatttgggttccatccctaagatgtctcattatgtataagcagatattccaaaatctgaaaaaaaatcccaaatccaaaacactctcatcccaagtattttggataagggatactcaacctgtaatgtctcaatgatatgctatatgtgtcccataagtcaaatccagctccttggtatcaaagaaggtagaaattatatgaagggcctaagaaggtaagaatatcatgaagaatgttaaagactaatggagatgtcatttgcaacacaacaatactgaaagcatgcctttgaaatcagttcacctagtttcttaaaacatagccttgaggacggcgcagtggctcacacctgtaatcccagcactttgggaggccaaggtgggcgaatcacaaggtcaggagttcaagaccagcctggccaacatggtgaaaccctgtctctactaaaaatacaaaaaattagatgggcatagtggcgggctcctgtaattccagctactctggaggctgaggcagaagaatcacttgaacccgggaggcagaggttgcagtgagccaagatcatgtcactgcactccaacctgggtgacagagtgagactccatctcataaacaaaacaaaacatagccttgagttcactgaatatcagttgatagtctagagagtatattctaagttatttaaggcagataaatttacccagtgagagtaagttgctgtagttctccatcatcacatcccagtacaagttcctctgagcagaatccagatattcccattcctcctgagagaagttgatgaccacatccctgagtgtcaccagttcctgaaacaacaaacccgtacattacaggtaaaatttaaggaaatatttttgagaaaaagacaagaggaattgccttatagcaaggggattggacagtaaacaaggaggccaaaagaagactgtgacatgggaagtaaggaaattagtgcttccaaaccagactatcatctttcaagactccctttgatccactgaaatctttctgcatacttatgggatctcttatttagccaaccatgtctggaaattaataaccagtttacaaattaaaagaagtactatatacaagcacatttcatgctatgtgcctgcctcatgaatcatcaataaaggtaagtttctataccgtcattcccctgtacaggagaaaaatatctaactttgaaaatggggtatgaataaaattaaagatttcttgtagctccaagttcattactatgtgacatattatttcacattatataataacaattattacttccagcgataaagttttttttttttttttgagacggagtctcgctctgtcgcccaggccggactgcggactgcagtggcgcaatctcggctcactgcaagctccgcttcccgggttcacgccattctcctgcctcagcctccccagtagctgggactacaggcgcccgccaccgcgcccggctaattttttgtattttttttagtagagacggggtttcacct[140 bp omitted]gttttcttgttaaaaatataatagccttaattatattccaacgtttaggttagagaaggtcttctccaatgctgcgtctacaatcatcatcattttgtatgacttgaggccattcaacatcaaatcaatctacctggaaactcaagtctgtggagaaggtcagagtatgcccaattatcaaacagatccatctgctttttccctatccaagaatatgacaaggaaaagtctagggattcaacttttgctttatatctgctcttgacaaaggactgaacacataggagtgttgaacattctttggggaatagaggcacacaggagggacactgtgctgttagactccagcccttactagaaagcgaagaagtatggggttgtggtacaggttctttgacagaggtgtttggtaggaagaatcagaaaaaggaaatatcacaaagaaaagagaagtagttaacttacatggtccatggttagaactgtaaagaattggtcagggaattccacttctggcatgacagcatgaggagctccatggacatgatccccaatgaaactgtaaaaattattttttaagaaagaaccaccattaaaagtctctggaaatggtgctaggaatgtacagcaaatgaagaaacattagtttaagagaatctcaaaaaacatgttaagaactcttagagtctagactccgtgaaccaaacctgagccctccattgtccattctatcttggtgagaaagactccactccagacaggatagccaagggcatggggcttcttcaccacttctcaacccttgccccagtcagatagctatcttcctaggtggggtaagacatcatcacttttcactctgccccagttacctgttgcgcagctgaagaatgaggactcccttcctctgcctagccccaaaacatgaaatgtaggctttaacttggatgtggtactgctgagcatactgaggtttccaactgttgtgtcctggctcccggggcaagtgttccatgcccaaacaggcaagccaggcagacctggctgctgccccatctgccatctaccaagcactcagctcctaaagcaggggaatcactcagagagatgcacgccattgtccctacctccagcactagaatggtggctctgagattttgtccagggggagaagcaggccatagaacagagagttctgtattgctcctcaaaggaactgaattgacttgcaacagaatgtggagaagtttaaacctaagggcaatgtcaaaaactgaaaattttggtgaagggcaattgagaggaggttgattagagatgtatattatactgtagggtggcttgtttgccagacagaaactgagagacacctgggaagacattctattgtcagaacaaatctcgaacactgacctcaaaaaagccccagtttgattacattagcctgtgaagcaatgtatactccagggcacttatgaaagcaatactgccataagttgcaattagtggtgcttaacagctgggggtggtcagggagatgctcaaagacagccctgtcaaaaccactatcatctaacgctgtctgtaaaagtaggcaaggctgtactcccaatgagcaacatcagagattttacaacatggtgggaatagacttcactaaaataatccagagagtccattctcatgctgctataaggatatacccaagactaggtaatttacaaaggaaagaggcttaattgactcacagttctgcatggctggggaggcctcaggaaacttacaatcatggcagacggcacctcttcacagggtggtaggagacagaatgagagccgagctaagggggaagccccttataaaaccatcagctcctgtgagaactcacccactattacaagaacagtatgggggaaaccacccccatgattcaattatctccacctggtcctgcccttgacatgtggggattattacaattcaaggtgagttttgggtggagatacaagagccaaaccatattacagtcactaagcaggtaaataagcaagtaccaataacaagccctgaggcagagggtgtggacaaaagtactggagttccaacaattgtctataatgtccactttccacaaacaagagacaggcaaagaaacaggaaagtatgattcacacactggaaaagaagcccacaacagaaactgcttgtgagagcaaccagatttaacaggcaaagacttcaaattatacattataatacatattcaggtagacaaaggaaaccataaagaagtaaatgtaggtatgatcataatgttgcatcaaaaagagaatatcaacagagataaaaattattaaaaataaacatatggaaattcttaagttacaaagtataataactgaaatgaaattttcactagaaggactcaatagtagacatgaactggcagaagtattaacaaagttgaagacagattaatagcaatggtataatctgatgaacagagagaaaacaagacaaattaacatctcagagaaatgtgggaccccattaaccacactgatataaacaggagtaccagaagagaggtgagagagaaaaaaaaggatttaaaatttacaaagaaataatggatttgaaattcccaaatttattgaaaaacattaaactgcacatccaggaagctcaacaaacaccaagcaggataaatgcatagagatccaaacatagatgcatcattataaaagcactgaaatccaaagaaagaaatggagaaaatcttgaaagcagtaaaaggaaactgcaggctagaagtgaaactaatacaaaagtattaactgctgatttctcatcagaaaaaaatgaaggccagaaggcagtgggatgatatatacaaagtactcacacacacaaaatccttcaacccagaatcctaaatccatcaacacataaaaaaatgaagtgaccccctacctcacaccacttacaaaaattaactcaaaatggattaaagtcttaaatataaggcctgaaactataaaaatcctagaagaaaacatagtaaagctcttgacattggtcttgcaatgattttttaaaatataacaccaaaagcaccggaaacaaaagcaaaaacaaagaaatgggaccaaataaaattaaaaagcttctacgaaagaaaggaaacaatttaaaaagtgaaatgacattctacagcatgggagaaaatatgtgcaaattatatatctgacaaggggttaatatctaaatatataagaaattcattcaactcaatagcaaaaaaaaaaatccaattaaaaaaataagcaaagaacctgatagacatttttgcaaagaagatatacaaatggtcaacaggtatataaaaaggtgctcaatatcactaaacatcagggaaatgcaaatcaaaaccacaatgaaatatcacctcacacctgataggactgctgttatcaaaaagacaagaaagaaaaaaaatgttgacaaggatatggaaaaaagggaagccttgtacactgtcagggatgtaaattggtacagtccttctgaaaaagaatatagaggctcctcaaaaacttaaaaataggacaaccatacaatccagcaattctgcttctggctatacagccaaaagaaatgaagtcaataactcttttccccctgcaccaagatggagtcttgctctttcacccacggtggagtgcagtgccacaatctcggttcactgcaacctccacctcccgggttcaagcaattctcctgtctcagcctcctgagtagctgggattacaggcatgtggcaccatgcccagctaagttctgtatttttaatagagacggggtttcaccatgttggccaggctggtctcaaactcctgagctcgtgatccacccaccttggcctcccgaagtgccggaattacaggcgtgagccaccacacatggccaagtcagtaacttgaagagatatttgcagtccttttcatggctgcattattcataataaccaaggtatggaaacctaagtgtccatcaatggatggacagataaaagtgtgtttgtatgtgtgtgtatacatatatgtatgtgtcaattatatatcagtaaaacagaggggggtggttatccttatgcagcaaacctatatttcaaaacttaagaacatttcaaaacttaagatgaaaagacatttccagataaaaactgaatttattgctagctgactgaccttaaaaagtactcaaggaagctctttaggctgaaaacaggtgatcccaggcagtaatacaaatccataagaaaaaacaaagagaagtggcctggtgcgttggttcacacctgtaattccagcactttgagaggctgaggcgggaggatcccctgaggttgggagttcgagaccagcctgatcaacgtggaaaaacctggtctctactgaaataaaaaattagccgggtgtggtgatgcatgcctgtaatcccagttactcgggaggctgaggcagaacaatcacatgaacccaggaggcagaggttgcggtgagccgagatcacgccattgtactccagcctgggcaacaagagcgaaactccgtctcaaaaaaaaaaaaaaaaaaaaaaaagagaagcaagccagttttatgtaattataaaagacagtatacatatatatctcttctcctcttaactgatatacaaattttatgaaacgtgtacttatgtatttattgggcccataacatacagaaatgtaatatatttgctaataataacacaaggcaggggaaagcaaagttgtactgggctaaggaaatgaatccagatggtaactcgaatccatctggaccaaatgaggagaacccaaagtgagaaatcagattgataaaataaaagttataaatgtataaaggttctcctttcttctcatttttttttaaaaacatagacttatataaggtaaaaattacaacaacgattggttgagtttgaaacatctgtagatataatgtgaagaccaatattactataagagaagatgaaaggaaataagagttatataggagtaaatttctctatctcacttgaattaagccaatataaatcagaagctgtttctgaagtaagatatttggcagaataaatctctaagcagcaaagtgttcagggtgctgctcggcttctcttaactactcagagtaaaatgtgagaagaaacaatacaaagatgggatttataacacggaagcaaaatatagagatttgaaaattctcagcctaagcatgtaaataaaaaggtatttaggaaagtaaaccaagggtgtgaccaagtgactttctgatcagagtgtggctagaaagaagccaggtgttttcatcatgacaataggagaatgaacccaatggcacttcagagagcttcaaggctgctcctcccatcacaggcccacagtgcgagggccttgaaggcaggatggtttccagggaagggcgtagaacactcatggaactttggggcttgctgcccggggctgcctcaagtctctgctccccacatcccggcacagtgctccttggctgccgtagttgtggctccagtgggcccaggtgcagtttagtccctgctctggagggcaaagtggtgaacctcagcatccacatggtactgattttgcaagtgtgcagagtgcacaagatgtggaagcatggcatccttcaaagagatttctttttttttttttttttgagacagactctcactgtattgcccaagctggagtgcagtggtgcgatcttggctcactgcaacctccgcctccccggctcaagcaattcttttgtctcagcctcccaaatagctgggattacaggcacgtgatgccttggagagcctcagggcctagacagagacctactacagaggcagagccactgcagacagtcccccctagggcattgtccagtggagtcatacaggctgtgccactccccaaaccctagacctgtagagccagcagcatgcaacatgggcctgggagagagccagtggcacctgactgcaacctatgagagctgcagtatgaactgtgcacaccaaagccatggtggcagggacccttcgggcctttggggtccaacccccatcccagtgtgtctggaacatgcgacaaggagtcaaagatgattattctccaggctaaaggtttattgttgtttgccctgttcagttttggacctacttgagaccagtgacccatactttcttatttatctgttttggaatagaaatgtctgtcctggccgggtgcagtggctcatgcctataatcccagcactctgggaggccaaggcaggtggatcatctgaggtggggagttcaagaccagcctgaccaacatggagaaaccccatctctactaaaaatacaaaaaaattagccaggaatggtggtgcatgcctgtaatcccagctactcgggaggctgaggtaggagaatcgcttgaacctgggaggcggaggttgcggtgagccgagatcgcaccattgcactgcagcccaggggaaaaaaaaaaagaaatgtctgccttattccattattattccattgtagcttggaagcacgtaactagtttggtttcacaggtacaggactagagagcaatttgcctcaggatgaatcacatgatttagataatacctagatgagactctgccctttaagttgactttaaagtttatgctgaaatgagttttaatactttgggggctattggagtgaaatgaatgtattttgtacatgagaaagacatgaatatagggggggtccaggggcagaatgtaacatgtcctctccaaaattcaggtgttgccaatgtgatagtattagaaggtggagcctggccgggcgcggtggctcatgcctgtaatcctagcactttgggaggccgaggtgggcggatcacgaggtcaggaaatcgagaccatcctggctaacagggtgaaaccccgtctctactaaaaaactacaaaaaaatagccgggcgtggtggcaggtgcctgtagtcccagctactcaggaggctgaggcaggagaatggcaggaacctgggaggcggagcttgcagtgagctgagattgtgccctccagcctgggcgacagagcaacactctgtctccagaaaaaaaaaaaaaaaaagaaggtggagcctttaagaggtgatgaggggctcctccctttgtgaatgggattacagccttcataaaagaggctcaatgcagacttccttgtcctcccttttgcacgtgaggacacacgtcctttctggaggatgcagcatcaaggcacccttggaagaggacatttgaacctgatgatgccttgatcttggacttcataaactacagaactgtgatacatttctgttctttataaatcaggtat[139 bp omitted]acagtgaaaccctgtctatactaaaaatacaccaaaaattagccaggcatggtggtgtgcgcctctaatcctagctactcgggaggctgaggcaggaaaatcgcgtgaacccaggaggcggaggttgcagtaagccgagatcacaccacagcactccagcctgggcaacagaatgagattgtgtctcaaaaaaaaaaaaaagttgtctatgggtgactcagctgcaaagctgcaaggagattgagagtaagacgatggaaaaaacggtcaagccgagaaccaaatcaggaacacaatcccatttacaattgccactaaaagaataacatacctaagaatacagctaaccagggaggtgaaagatctctacaatgagaaccacaaaacactgctcaaagaaatcagatgacacaaatggaaaaacatggtaggaagaatcaatatcattaaaatggccatactgcccaaggcaatttatagattcaatgctattcctatcaaactaccaaggacattcttcacagaactagaaaaagctattttaaaattcacatggaaccaaaaaagggtctgaatagccaaggtaatcctaagcaaaaagaacaatgctggttacatcacactacctgacttcaagctatactacaaggctacagtaaccaaaacgcaatggtttggaaacagacacacagaccaatggaatagaatagaggacctagaaagtcacacacctacaaccaactgatctttgacaaagtcaacaaaaataagcaatgaggaaaggactccctattcaataaatggtgctgggatgactggcatatgcagaagaatgaaactgcacccgtacttttcaacatatacaaaaattaactcaagtttgatgaaagcttaaatgtaagaactaaaactaaaaatcctagaagaaaacctaggaaatacccttgtaaacatcagccttgacaaataatttgtgactaattcctcaaaagcaactgaaacaaaacaaaaattgacaagtgagacctaactaaagagcttccgctcagcaaaagaaattatcaacagagtaaacaacaacctacagaatgggagaaaatattcacaaactatgcatttaacaaaggtctaatatccagaatctacaaggaatttaaacaattcaacaagcagaaaacagtcccactaaaagtgggtaaaggatatgaacagacccttctcaaaagacatacaagcagccaacaaacatacttttttaaatgccccacaccactaatcatcagagaaatgcaaatcaaaaccacaatgagttagccatctcatatcagtcagaacaattattgttaaatagtcaaaagtaacagatgttggtgaggctgcggagaaaagggaatgcttacacactgttggtgggagtgtaaattagtttagccactgtgggatgcagtttggagatttctcaaataactaaaaatagaacaaccatttgactcagcaatcccattattgggtacatacccaaaagaaaataaatcattttacaaaaaagacacatgcactcatgttcatcacagcactattcacaatagcaaagacacagaatcaacctaggtgcccctcaacagtggcttggataaagaaaatgtggtatacatatgtcatggaataccatacataaaaaagaacaaaatcatgtcctttgaagcaacatggatgcagctggaggccattattctaaaagcattaatgcagaaaaagaaaatcaaatactgcatgttctcactgctaagtgggagctaaacactgggtacaaatagacataaatatgggaacaatacacactgcgactactagaggcgggagggagggagagaaacaagagttgaaaaactattgggtactaggttcactatctggaagacaagatcaattgtactccaaatctcagcatcatgcaatatactcatgttaaccaacctgcaaatgtaccccctgaatcgaaaataaaagttgaaaaaagaaaccaaaaacacaatgaaggagaaactaaaacatacccaagtaaacaaaaactgagggacctcattcgaagacatgccataatagaaaagctaagggagccctgcaagttggaataaaaagacagtagaaagtaactcaaagccatatacaaaaatgaagaacaggccgggcgcggtggctcacacctgtaatcccagcattttgggaggccaaggcaggcggatcatgaggtcaggagttcgagacaagcctggccaacatggtgaaaccccatctctactaaaaatacaaaaattagctgggaatggtggcacatgcctataatcccagctacttgggaggctgatgtaggagaattgcttgaccccagaggcggaggttgcagtgagcagagattgtgccaccgctctcatgcctgggcgacagagtgagactctgtctcaaaaaaaagaaagaaaagaaaacaacgataaaggtacctaaataggcaaatacaaaagtctattgcatcttgggcttgcaggtcctctttatttccccaatatgatttaaaagactaacgtgtaaaacagtcattataaaccaatgttaaagagcacacaatgtataaaaatgtaatctgtgacaaaacaacatgaagaggagcagaactgtataggaacagagttttggatatagtattaaagctaaggagtatgcagcacagttttgattcaacaggtctggaattttgtttgtttgagacagggtctcactcttttgccccggctggagtgcagtagtgtctggaatgtttaaaccctgcctattccaaagaaagttgtagcccttgactaacacctagaagataaattctggccccggaatagccagctttcattaattttaatgtgatcctttcactagtgggaaaacaacaacaacaacacttttctgagttgtgtgagtccatctagcagtcagtgaacctgaaagtggtcttggagttccatgaccaaagtctataaattcaaaccagttatttgtaaatgtaaaatattcactgtaatcttcagaacacatgctaagaaaacaatcagcttatataaaagaaatgacaagggaattaaaatggtacagtacaataagttaattaaaaccaaaagaaagccaggtgtagtggctcataccacttatcccaacacttttgggaagctgaggcaggcagatcgcttgagcccaggagttcaagaccagcttggccaacatggtgaaaccttgtctctaccaaaaatacaaaaaattagccaggcatggtggtgctcacctgtggtcctagctgttggggaggtggggggcgggggtgtgtgagggctggggctggggtaggaggatcacttgagcccaggcagttgaggctgcagtgagttgcgattgcaccactgaactccagcctgggtgatggaatgataccttgtctcaaaaaaataataaaaaaaagggccaggcctggtggcttatgcctgtaatcccagcactttgggaggccaagacaggtacatcacctgaggtcgggagtttcagaccagcccggccaatatggtaaaatcccatctctactaaaaatacaaaaattagcctggtgtggtggcaggcacctgtagtctcagctacttgggaggctaaggcaggagaagcgctggaaggaggcagaggttgcagtgagccgagatcgcgccactgcattccagcctgggcaacagagcgagactgtctccaaaaaaaaaaaaaaattcatatgacattgcaacagattcagccaaaacaaagctggaagactgatatttcccaattcagaactgactataaaaccacaataatcaagactgtggggcacggaatatggatagatatattcatcaatggaatagaactgagtgaaaatttaaaccagtgtagctagggtcaagtgatttttgacaagggtgccaatctaatgaaatagaggaaagaacagtcttttcaacaaatggtgccagaaaaattgaatatccacatgcaaaagaatgaaattgcatcactccttaataacacataaaaaaagtaactgaaaacagatcaatgacccaaatataagagctaaaactataaaactcttagaaggaaatgtaggggtaagtcatcatgaacttatatttggcaatggattcttttttttttgagatggagtctcactctgtcacccagagtggggtgcagtggcgccatctcggctcactgcaacctccacctcccaggttcaagtgattctcctgcctcagcctcctcctgagtagctgggattacaggtgcctgccaccatgcctggctaatttttgtatttttagtaggagacggggtttcaccatgctggccaggctggtttcaaactcctgacctcaagtgatccacccatatctgcctcccaaagtgctgggattacagtctgagccactgcatctggcctatatttggcaatggattcttaaatgatgacaccaaaaggataagcagcaaaagaaaattttgatgaattaggatgtatcaaaactaaaagcttttgtgcatcaaaaaatcattatagaagaaactgataagacagcctgcacgatgtgaaaaaatatctgcaaatcatatatctcatgagcatttaacatccagaatatataaaaactcctacaactcagcccaacaaaaagacaaacagcccaagttaaaagctggcaaaagacttcagtagacatttcttcataaaagatgaacaaatggtcaacaagtacatggaaagatgctgaaaatcattagacaataggaaaataataacagaaccatgagaataacatcagcaagatggcagctgaggaagcttcaattccctattctctattgaaacacttaaaaaacaactagagactagctaaaatatctttgtaagggtctggaaatcactcaaagactgtaactatcaaacaaatgcccagtcaggagaaagtcacattcaaaatggtagtgaatttgttgattatgttacttgtgctcttactccatctctagtgcagcatggaagaagcagcccagttcccatttccctccttcaggccagaaggaacaaagcagagcttatttggaacatgctaatctgtctgtgggctccttgaggtactgaggtactggtttctgttttatctgattttctttcttttttttttttttttacacagagtctcactttgtcatctaggctggagtgcagtggcatgatctcggctcactgcaacctctgcctcccaggttcaagcaattctcctgcctcagcctcctgtgcagctgggattacaggtgcacaccaccacgcctggcaaatttttgtacttttaatagagacagggtttcactatgttggccaggctggtctcgaagtcctaacctcaagtgatctgcctgccttggcctcccaaagtgctgggattacaggtgtgagccactctgacttttgagtttcaacatgtaaaaggctgcacagctcagatctcaggcaggtaaaggccacaaaggacagtggtgggcactgtggtgcatcaaagctaaaacactattaaaactagaaataagtgcagcagcactgcaggatataagatcagtatgcaaaactcaatgatattttaattgcctggacacctgtggatacttggagcaaacgattacaggtggaaaaatataacatctagggcctaagaagcaagggtgagaccctatgaaattaaggcatttgaaagcagctatgcatattagggaaactggtaaaagcatatacacaggtataggcacaggcatgctacagacccaggaaaaacgtaagaccttagactttcaccctgagatgatcccaaggccctaattagtgaagatctccaacggtctgcaaaaattaggagaagtagctgtttcttcaaatgcccagttttcaacaaaagactgcaaggcatacaaagacacaggaaaacagggtccaatcaaaggagcaaaataaattacacttgaagaaacaaaagcattggagtaactagaaaaaggctttgtaaaaactgtcttaaatatgctcatagagctaaaggaaaacagagaaagaactaaaaaggaaatcacgaaaatgacatataaataagtgagatatcaacaaagagaaataattactttttaaaaaactggctgggtgtggtggctcatgcctgtaatcccagcacttagagaggctgaggcgggcaaacaacacgaggccaggatttccagactagtctagccaacatggtaaaaccctgtctctactaaaaaaaaaaaaaatttagctgagtgcagtggtgcacacctgtagtcccagctactcaggaggctgaggcatgagaattgcttgagcctgggaggcacagaggttgcagtgagtcaagatcacacaactgcactccagcctgggtgacagggcaagactcttgttgcaaaacaaaaagaaaaagaaaaaaatgaagaattggctcagagtgctcaaaccctgcacattccaaagaagaaattgtccttgaccagctcctgggagataatctctgagcagttagagtatcctgcctgattaacagagtctatgtatatctgaggtcttagccatgccagatggcttttgttaacaatgtggtttatggtaaatacctgtatccatctgacttctgggtaggcttgactaagtaggtaaggtcagtgcacagaaccttcatgcccacatgactgatcgtcaataaaaaccccggacatgggccagggcagtagctcacacctgtaattccaacactttgggaggcagaggcaggtggatcacttaagcccaggagttcaagatcagcttgggcaacatggcaaaaccccatctatacaaataatacaaaaattagccgggtgttgtggtgtgtgcctgtagtcctagctacttgggagactgaggtgggaggatcccttgaggctgggaagtagaggctgcattgagctgtgaccccaccactgcatttcagcctgggtgagagagcaagaccctatctcaaaaaaaaaaaaaaaaaaaaagaaaagaaaaaagaaaaaagaaaacaaagcaaaacaaaaaaccctggaaaccatggcttaggagagcttccctggttggccacgcttcatgtttgtattcgcacattgttgctgggagaattaggtgctgcctgtgcaactgcactggaagcttgcacctggtttctcccggtatttgccctatgcaacttttccctttgctgattttaatgtgtaccttttcattgtaatgaagaataactatgagcataacagcttttctgagttctgtgagtccttctcgcaaatcattgaacctaagacagtcaaattgccttaatagaacatttgcaaatctggcttttaaaaaattcatttcaagtgcccatcaaaattaactttatattttcattgctcttgatttacagaaaatgtatggggaatactaagaatcttcacaaaccagctttttttcttcccttgcagataaggacttaaagtgccaggcctttattaaattctctaggtttatgtccatattaatgtatccaggcctcataaagaccctaaagcactgatataattattgtttacattctacaacaagaaactgtaaagcggaaaaatgagtaactattaacccctttgaaatgcagtgtgaacatataactgaattttaaatttttttcacttttcctaagctaattaacacaggattacctttaattttaattaacttacatttaaatacaaaagcaatataaatgtttttctattaaacacaactttattgttttggtaggactataattcaccctaaacactgaaaatttagcatccaaattgagacatgcaataacaataaaacatataccagattttgaaaacttggtataaagatatgagtgtaaagtatttcagtgtattcatatcattacatgttgaaataatattttggatatattggtttaaataaaatacattaccaaaatt[135 bp omitted]acatgatgaaaccccttctctactaaaaattcaaaaattagccgggcatggtggcgggcgcctgtaatcccagctacttgggaggctgaggcaggagactcacttgaacctgggaggcagaggttgcagtgaactgagatcgcaccattgcgctccagcctgggcaataacagtgaaactctgtctcaaaaaaaaaaaaaaaagtgtctaatggaaatttttaaattacctaagtggctttatattatatttgcattagactgtgctgctttagactcagacaccactgtatcaggctgcctctcacaatctacaccaatgtcacactgccaaatctcaaagaagatttggttgtcaccacttaaatcccctcatgaatgttctggaaaaactccctgcccttgttgacatagcctctctgcataaaactcctatcatattcccactcctaaatgtctccaaagccaactttgtcacttactgattaatacctaccatctcctatcttgctttgtttgcaaatcaagtctgtaaataagatcaaaggtatctagtgtgccattctacttaatcactcgtctcctccttaacaaattacattctaaaaaaaagttttaacttctcctccaggagttgtatttctataccataaaaatcctttggaaaaaaagaagcacatgggagaattgaatgatttacctaatgcatatgtgaatattcaatgaaagggaaatgggcatttggaaaggcaatggaggacaaggggacccatctctacggtcctgttgttaattgggaagagaaaaccaagggaccaggtaaatgaacaaaaaaaaaaactaaccttgagttggccattagtaccaatgctgtcttccacttcagggggccttcacttgcagaactacataaccaagagggagaaaggactcatgacatcctggactggttaaataagaacacagtgttcaccaccagaaaagcccatcacacacaacaaacacacccagatcgaagagggaaactagaatactgtcgactcctccccacatccgagaaaaaggtacgaccaatgcctagcagtttctagggaacacagctcaggaaatactgtagttctttaatgtataaatggcctccaaactcatgcaaggggagttatcccaggaatgaatactacacctatgccctccccttcacgtcttcccaggaaacttcatttatctatcttatctatctatctatctatctatctattatctatcatttatctatcttctatatatcatctatgtaatctatctatatgcgtgtgtgtgtgtgtataagacctcacgaagagattccatcacagacatcacagagtcggaaaaatgacgctttacccaaaacaaactcctacaggctcacggaaaaaaacgaacaaacaaacaaacaaaaaaaaacaaaaaaacacttctaccccgttcacacttatagttggtcacaacagtgctgtcacacgatcacgtcaccgtagaccagggtcacacgatagaccccgcccctactcaccgtcctgagtccgatcaaacagcacccacggcacacactagggtctccgtctctcacacacacacaccacaatgacgtcgtaaacaatagcactaaccaccatcgtccgcagctcccgcgtacagaggcctcaggctcccggctccacgtggaccgacctcgcccggcagcgcggggccacctcaccgcgagctcctcccgcagcccggcccgggtcacctcgactcgccaggcttaactcaataaccacaacaccggaaaaggaagcaaaggtcgaagttcatccgcggccctgaggcctgtgggaaacgtagtccaacaacgaaagagccctgaagctcaagcggagcccgctggccgcaggggccgcaccacgccccagaccctggagtttccgggtgcgcagacccttgccatcagcagaggctgccgctgcgcgtcccctaggcgcggaagaggcggctggtggtccctgacggcaaggtgaagtcgaggcagtaatcgggaacccaggttgggaggacagaatggggaacaggaagctggggcgagggtggtcttgggggaggtggggggccgcggaattctaggtggcccctgcctcacctctggaaagaaccggaagcccgggccggggagggtgaagggagtcgcggacccggctgctcagccgaggaggaaacccggaccccaggctgagggaggccgaagaaggaactggagggccgggctgggaaggcctgaagcgggtacagcctttaggctggggagggtcgaggggagaactcggagcctgagtcgggcgaggttttgctccactctggcttctaagtgtgggggcctcaggatgtgacccgtggtcgtaaacctgagggtgacttggagtttttgtccgttttgcaccatgagaaaggccccagatggaatctggcaggtagcggcggttcagtgtgtgtgtgtctgccttagggcgtgttttacactgttgacgaaaagactcagactctaaagtatttgaagagacttattctgagctaaatatgagtgaccaatggccggtggcccagccctcaggagatcttgagaacctgtgcccagggtggacgggatatatgtggttttataccttttagggaaacatgagacaccaatcaaatacatgtaaaatgtacattgattccctccggaaaggcgggacagctggaaggtggctggccttccaggtcataggtagattcaaagattatttgattggcaatgggttgaaagagttattgacgtaagacttaggaatgtctccaggtagcacgcttcacagagaatagattgtaaatgtttcttttcagacttggggtcttttctatcagtaattccaaaatggaggagggtataatgaagcatgtccgacccgcccacccccgcctttccatcatggctttactagtttttcaggttaggaatgccctggccaagaggaggggtccattcaagatggtctgggtgtgcttaggattttatttttggtttacaacaccagcaccaccggagtttgctggtgtcctttccagtcagtttcaaagcagagacagccatagttctgatttgtgtcactgtaactgtcagttccggaattccatatttctcctttagtttaccctaatgtgtgtgagatttcatgtgtagttcatttttctttttctgaacagcactccattgtgcaaatataccacaatttgtgtagtcatttttctgttgttgaacatttggcatatttacaggttttatacattacgaataaagctggcacgtttccatttctcctgggcaaatatttagaagaaaagttgctgggtaattggtaagtttacatttaactttccaagaagctgataagccttttagaatgattagttgtgatttgtgtgtgtgagattgtgtaactggagtaagtagtttctgagtttgctttgctatgtttgtatggaattataagatgggctcaacagggttgtgaatgtcatgtaggatccataggattgtggctttgtggagtaggtaagatcacaggaaactgaatgtgtctgtgctaattgttatttatcatggttttgtgtgtacattccatgataactgaaaatggatcactatgtaagtgatgttaatgactgaagaactctgtgtgtctggtgtatttcattttgcttgcagaattatgacagtttctaataactaaaatatcacaagcattggaaactaggaggtaaaattataatttctagatgacagggttgcattacctggaaacatcatacaaactaaatccaatatgttgaaatgaggactccatatgtagcacagaagtaaaatactttcatccctaccactttgaatagttatatagatttgaggtcccctcccacccatccccccgcctcctgcttgcccctggatgaagttgagggtgatttaatgccctcctaaatcactttaagccaagtaaaagtacttgaaatactaaaaatcacaaagtcagctttgtagtaattaaaatagtcattttctaattaaaatatttactgtaaaaatcaaatttcaaacttcatttaaaagaaaaatttctttcaactgtctagagcctacagtgtaattactttcttctctacttccccaaccggtattactaaataggtactatctcgcataatgattaggatttaatagtaaatgcttattagttaaccaggcaggtttaaccacgttattatagaaactctaagaggtttcacatgtgttttttttttgttttgttttgtttgtttgttttgagatggagtctcgctctgtcacccaggtgggagtgcaatggcgtcgtcttggctccctgcgacctctgcctcccgggttcaagcagttatcctgcctcaacctcccaagtagctgggattacaggcacccgccaccacacccggctaatttttgtatttttagtagagatggggtttcacca[136 bp omitted]ccttttgaaaaaaagaatccaaaagagcaagggtcctttcctgcaaattataaaagctatggctgagaatgaatgtttcttctctcctttctgaaatatctttcccccaggataactgagcatttgcctaccatgaaacttccatgagacaggattctccattttcttttattctagtcagataacgatgttgccttctccaagtttcccttctaattgtaactactgttcacttaataattggatattttggccgggcgcggtggctcacgcctgtaatcccaacactttgggaggctgaggcaggtggatcacgaggtcaggagttcaagaccagcctggccaacatagtgaaaccctgtctctactaaaaatacaaaaattatccaggcgtagtggcccgcacctgtagtcccagctactcgggaggctgaggcaggagaattgcttgaacccaggaagcggcgtttgcagtgagccaagatcgtgccattgtactccatcctgggctacaaagcaagactccgtctcaaaataataataataataataataataattggctatatcactcagcactccttttcactcctataaacagaaacatattcccttgaattaaataagcatatgttcctttcataaaccttttttatacagatagtgatttgatgtctatgtagtgagtactcaggagagcccatacaagggaaagcctcatcatgtccacatatctcagtttactagtgagtgattctactttttcttttttcttttttttttttttttgagacagggtctttgtcacccaggctggggggcagtggcacaatcttggctcactgcagcctcgacctcttaggctcaagtgactctcccatttcagtctcctgagtagctgggaccacaggcacccactactatacctggctaatttttgtattttgtattttaggtggagacaaggtttcgccacattgactgggctggtctggaactcctgagctcaagcaaccggccctccttgacctcccaaagtgctaggattacaggtgtgaaccaccgtgcccggccctactttctatcgaagtagaataggtagatcacattattattaacagtatatgggaagagggaggtcctcccatgttacattgttctcccttcaccttctgggtcatgttgcaccactgtttcccttctagtcatatcccagggggccttgtcccatttatacagctctattctagtggtcaccagaggaatgggagtaatctgattgaaagataagacagaagattgtactctcttttttttttttttgagacagagtcacccaggctggaatgcagtggcattgtcatggctcaccgcagtctcaaactcctgggcccaagtgatcctcccactcagcctcctgagtagctgggactagaggcacatgcaaccacatgcagctatttttttttaaattttctgtagagacagggtctcactgtgttgctcagtttgtctcaaactcctgggctcaagtgatcctcctgccttggcctcacaaagtactaggattacaggcatgagtcaccacactcagctgaactctactctttatgttcaggaaagcactggagaagagagaggacaagagaaacaggtccgtagtgacaggagcctaggaatagagcaggccttcagtcttggtgaaaaaataaatggtattctaagccttcctttggacattaattcagtactacccactctttttctcttgtccattcctcccttatattttttttataaaatgaagaactcaatcccttattttttttttctatccttcaagtgaagggcaagaacaaagagtgtgggggagattttttttttttttttttttttgagacggagtcttaactctgtcacccaggctggagtgcagtggtgctatctcggctcactgcaacctccgcctcccaggttcaagcgatcctcctgcctcagcctcccaagtagctgggactacaggcctgcgccaccgcacgcagctaattttttgtatttttagtagagacgaggtttcaacatgttggacaggatggtcttgatctcttttttttttttttttttttttttttttttttgagacggagtctcactctgttgcccaggctggagtgcagtggcgtgatctcagctcactgcaagctccgcctcccgggttcacgctattctcctgcctcagcctcccgagtagctgggactataggtgcccgccacgatgcccggctaattttttgtatttttagtagagatggggtttcaccgtgttagccaggatggtctcgatctcctgaccttgtgatccccccgcctcagcctccaaaagtgctaggattataggcatgagccactgcactccactgggggagaatttttttttttttgagatgaagtgttgctctgttgcccacgctggagtacagtggtgcgatcttggcttactgcaacttctgtctcccgggttcaagcatttctgctgcctcagcctccctggtagctgggattatgccaccacacttggctgatttttgtgtttttagtacagatggtttcgccat[139 bp omitted]ctcatgcctataatcccagcacttggggaggccgaggcgggtggatcacctgctgaggtcaggagttcgagaccagcctggccaacatggtgaaaacctgtctctactaaaaattagccaggcatggtcgtgggtgcctgtaatcccagctactcgggaggctgaggcagagaattgcttgaacccggtaggtggaggttgtagtgagccaagattgcgccgttgcactccagcctgggagacagagtgagactccgtctaaaaaaaaaaaaaatactacacgtgtgaattagaaattctaagctgagaaagctacttaaaattggtcaagaaaaagatacacattaagtataagaaagttggcatggctatagtagtatcagataataggcctcaaaacagtgtatatggcaggagataggtaacagtcataaaagagcaggtcattaggaatttgcatatacatttgtcactacagggatacattctgagaaatgtgttattaggtgattgcatcatgcaagcatcatagagcacactaacacaaacagcaatggggtagcctactacatacctaagttatatggtatagcctattgctcctaggctacaaacctgtatagcatattatatagcatatagcatacctgtattgaatgctgtaggcatttataacacagtggtgtttgtgtatctaaacatagcaaaggtacagtaaaaatactgtataaaatattaaaaaatggcacaccggtataagatacttgccatgaatggagcttgtgggactgaatttctgggtgcatcagtgagtgagttgtgagagaatgctaaggactaggacattactgtatactgctgtagactttacaagcagtacacttaggcttcactaaatttatttttttaagttttcttcaataataaattaaccttagcttcctgtaatatttttacattataaacttactattttttatctttctgaattgtagtgactcttcacttaaaacgcaaacacattatatagcaacacaaaaatatttctgtccttattctataggcttttttctatttaaaaatttttttgttttaaaaatgtttgttactttttaaactttcttgttaaaaacaaacacactttagcctgggcctacacagggtctagagtatcaatatgtctgtcttttaccgccatatcttgtccaactggaatgtcgtcttcaggattaaaaatatgcatggagctgtcatcgcctatgaaaacaatgccttcttctggatacctcctgaaggacttgcctgaggctgttttacagttactttttttttttaataagtagaaggagtacagtctaaaataataatacaaatagtacaataaattacataaactagtaatgtaatcacttattattatcacctattacgtactatacataattgcatgtgctatacttttatacaactggaagcacagtaggtttatttacagcagcgtcaccacaaacacctgagtgatatgttgcatgacaacgtccacaagtgataggaatttttcagctccattgtaatcttatgggaccaccattgtatatgtgtccatcattgagtaaaatgttattacatgacacatgactgtgttcatcaggaatatgtatgctagtatgaacctataatgagagtgttaaattttatgaagcaaaaactaacagaacaaaagaaatagatccacaagcataattggaaatccacaattatatctcagtaattgatagcacttgtaggcaagaaattcagtagtatatgtaatcagctcttcatatatgcagattcaaccaatagcaatgcacaaatattcagaaaaaacacaatgacagtaaaaaaatacaaattttaaaatacagtataaaattatttacatagcatttacattgtattaagtattataaaaaatctagagatggtttaaaatatacagaaggttgtgcataggttatatgcaactactacaccattttatataacaaacttgggcatctgtaggttttggtatccacaaggtgtcctggaaccagtcccctgtggatagcaagggacaactgtatagaagatatgaaccacaccagtcaacatgacctaattgttgtttacagaacaccatacccacaattgaaaaattacattcttttcatgtacctgaacagtccccatgatagactattggctggaccataagtcacaataaacttcaaaagattgccacattacagggaatgtgcattagaaaccaataataagaaacctatacagtccttcaatacatggaaattaaataacacacttctagatctacagatcattgaataaataaggggaaaatgttttgaaatatgaaaaagtgacaacagcatatcaaaattggaaggatacagctaaagcagagttgagaggaatgttaagtacttaaataaaaaaaggagaaattcatagcagcattattcacaataaccaagaaatacgtacaacccagatgttcatcagtggatgaatggataaacaaaatgtggtaatatgatttggatatttgttccctcaaaatctcacacggacatgtgacccccagtgttggaggtggcgcctagtgggaggtgttggattatggggtggatctcatgaatggcttggtgtcctccacatggatatgagttcatcctatagctagttgtttaaaagagcctggcacctcctccctctcccttttgttccctcttgccatgtgatatgctagctctccctttgccttctgccataattgtaagcttcctgaggcctcaccagaagcagatgctggcactatgcttcttgtacagcctatagaaccataagctaaataaaccatttttctttataaattacccagcctcaggtattcctttatagcaacacaaaacagactaatacatgtggcatatacatacaatgtaatattattcagccttggaaggaaattttgacatatgctacaatgtggctgaaccttgaggatattctaataagccaatcacaaaaagataactacttatgattccactcatatgaagtatctagagtagtccacctcataaaatcagaaagtattactggtctcccacttttaggctattaacgcttgtagtgagagtttgtaggtttcttgtcgtggttgccaggggctgggggcagggggaaaagggtagttattatttcatggatatagtttcacatttacaggatgaaaaagttgtggatgttggttgtacaaaaatgggaatatacttaatgctgctgagctgtatactcaaatagttaagatggtaaattttatgttacatgtatactttgccaccatttttaaaaatgaggaaaggcttaaacaagaataataaacatgctatatgc[171 bp omitted]aaaattagccaggagttgtggcaggcgccgcctgtagtcccagctactcgggaggctgaggcaggagaatggcctaaatccgggaggaggagcttgcagtgagccgagatcgcgccactgcactccaggctgggtgacagagcgagactccatcttaaaaaaaaaaaaaaaaaaaagatgagcataaatcaattaagtagaaatagaaagcagaccattaagaaaatgaacaaaacaacaagtttatgtgaaggtattttaaaaatggataaatccctagtaagcataattaataaaatagaaaacacaaattgcccatgtcaggaataaaaatgaagatgccactacggatcctatagacagtaaaatgataaggcaatattatgaacaattttatgccaataaatttgacattttagatgaaattcatccattcctttaaaagcacagcttctcaaaactcttgactcaaaatgaaatagaaaaacagaaagtctgtatctaattgtttgtttgtttgtttgtttggagacagggtcttgctttgtcagactggaggctagtggcatgatcatgactcactacagcctcaacctaccagtatcaagtgattcttctgtctcagcctcccaagtagctgggagtacaggtgggcaccactatggccagctaattaaaaaaaaaatttagagacagggtctcactttgttgtgcaggctggtcttgaactcctgggctcaagaaatcctcccaccttggcctcccaaagtgctgagatttcaggcatgtgccatgacacctggcctaaaattttaagttttaataaataaaaatccatacatacagaaccaggttcagctccactgaaacccctgcaactcagccaaaagtaaatgtaacatggttttgaatgctgtcttaatccagggcacatgaaaaacccttaaaaacaaaaacaaaaacaaagcatacctctgccccaccgagatgagctcaaaaacaaacattacaaacaacgaggaaataaccatcacaggagggtcagcagagtaaataaataataaagttggcacctacaagaactgcatataatatgacaatatgaaagaatatgaaatgttttaaatggaaaaaaactcataatgaaagcataatacttaaaaagaatcagtagatttaaaaaataaccagagaaaatttctagaaataaaaaagatcttaagtatagagaacataacaagcacagctcaaaattaatgaacttaaagatatatctgaagagattacctataatgcagcacagagataaaaagtgaaatacagatgagaaactgagacatggaagaaaataaaagggcccaagacacatctaataaatgtcataaaaggagaaaaaggaggagaagcatcagaagaaaaagtggtttacaacttttcaaaattaaactcaattttaagatgaggaatcaaaatgagtgtcaagtaggataatgaaagtggatctaacacctagacacatcacagtgataatgcaaaacagaaatcttgaaaagaaggaagggagggaaggaaagaaaagaaaaacagaaaagacatgctacctaaaaggaaagatgattgggcacaagatgtcagaagacaggagaataataccttcaaactgatagaggaaaagtagcaattaagagtggggcaaaataaagacattttcagacaaagataaggtttttttcatagactcactggaagaatttctaaaggatgtgaatcagcaaaaagaaaaacccagaaagacagaatgagataaaattttaaatgatgagcaaggaaattggtaaatatgttggggattctgtttactaagtaatgatgattactttttacggaatttcaaaacaaattagatcaaaagcaccagacaaaaatagaaagaggccggatgcggtagttcacacctgtaatcccagcactttgggaggccaagatgggcagatcacttgaggtcaggagttggagaccagcctggccaacatgctgaaaccccattttcactaaaaatacaaaaatcagctgggtgtggtggcgctcacctgtgatcccaactactcaggaggctaaggcaagataatcgcttgaacccaggaggtggtggttgcagtgaaccgagattgccccactgcactccaccctgggtaacagagggagactctgtctcaaaaaaaaaaaaaaagaaagaatgtacctacagcattctaaggtcttttttattgctcaagaaggagataccaattagtcattaagtcaaagatgcaaggttaagagtaacttccgatagtaaagcaatacaatatcttatttttaatccagtgcaggggaaagtagaataaggagcacttaattgatctcatagaagtcaataaaacataaaagaagcagcaagtataagcctgattaaacagaaagtggggaaagagatgggtcattgagctaaggggaggcctggtgacagctcttggaagatgaagtctgaccagaatagcacataagtcaatcaggttgctgtggccaaagtgcatcgtccttgcctctctgagtttgtagtggggagaaacaacaaacccaacactaaacatggaggaaagaattaaagactcaggcctatcagtttccactccctgccctcccgttactaccagtttaaaggcttacaggggctcatggatgagtgggaagtttttgtgacgtttgatagagaaatgagctgcctcttgaccagcagagagccccaggttcatcctcatgtggagtaacagggctgcagagcagtcagtgttccagagccctgtgctcacagatctagctacaatccccacctgcactgtttttagttgtgtatatcccttaatgttactgaacctcattctcttctgatgtaaaatgaagacaggcatttctgctcaacccatttcatctgtaaatggagggaataagtctttatgaaatgagacaaagtatattcagtgtctgcagtgcagttaataaattagtgtctttctacctgtttctcacaaaactgaaataaaagctggaaaattgctttgtaaaccataaggcactctgcatacaaaagagattactatgaatttttcctaagtgattaactcatgactcctttccatactcctcagcagtggcaacattgggaggctggattttggtgggatggaagataatgaggggactctggtttctggccagctccaggactggatgtgatggttaacgatacttaacatcaccacacagctcattccctagctggctcagtaactatggatctctaagcaatgtcttaacatttacgcttacatctgctaagctaagtatgtactgttccttgatttacatgccacattgattttttaaggggtttcaactgtggatcatgaggcagaagaggtgacaatgaaaggtcaggcaaagacaggagtgtccagtgtggaacacgaaatcccatcctgactataaaacattatatgctgtttattacattttaacttcagaaattatcgactccattttccatttccttgcaatatgtattgagcttttcagtcctgttttgtcatcatgcaaacaagtaaaattcttcaggatgcagacccacctaatagtactaaaaaggaatctttaaaaaatatggagatgtcttctccctatggagctacaggggaaaagacaccactctgtgtcataaaatctatttaaatggttgccgggcgcggtggctcacccttgtaatcccagcactttgggaggccgaggcaggtggatcatgaggtcaggagttcaagaccagcctgaccaatatgatgaaaccccgtctctactaaaaacacaaaaattagccgggcgtggtggtgtgcatctctaatcccagctactcgggaggctgaggcgggagaattgcttggagccaggagatggaggctgcagtaagctgagatcatgccattgcactccagcctgggcaacagagcgaaagcgagactccgtctcaaaaaaagaaaaaaaaaaagctatttaaaagaacctgatatgataaagtattgaattgagaacactcagtgaatatcagcattactctcctgttcagtagagagataactctgatcatcctcagctattttcctgtctataatttgcttatttgtattatttgtgcaaagaagtctttaacacctcatatttcaatagtaatcctaaatcctgttgtttatgtcataattcgctgccctgataatgcttaaactcatctctgtttttctaaaagacataaatatgtataaggtttctatattaagaaaaaagacgagtatgctgtttctgtttacttctatcagcataaaggtataataaaatcccatgagtggctgggcgtggtggctcacgccggtaatcccaacactttgggaggctgaggcaggtggatcacttaaggtcaggagttggagaccagcctggccaacatggtgaaaccccatctctactaaaaatacaaaaattagccaggcgtggtggcgagcacctgtaatcccagctactcagtaggctgaggcaggagaatcgcttgaacccatgaggcggaggttgtagtgagccaagatcatgccactgtactcgagcctgggtgtcagagcaagactccgtctcaggaaaaaaaaaaaaaaaatcccattagggaaatgcacaacaaaacaataatgagatactatgaatacacctactacgatggctataatttattttaaagtgttgggaaggatgttgagaaataaaaactcttttaccctgctagtgggaatgtaaaatggtccagttgctgtgaaaatcaatctggcagttcctgaaatggttaaacataatgttagcgtataatctccagttctgctcctcagatctacctgacagaaatgaaaacatttccacactaaaacaggcacataaatcttcacagaagcattattcacagtagccaaaaaatggaaacaacctaaacatccgtcagctgatgaatgggtaagcaagatgtcatatccttaccacactttagaatattattcagtcataaaaagaaagtaataatgatacacgttacagggacgaaccttcaaaacattatggtaagttaagctagtcatgaaggatttacatactgcatgactccatttatatgaaatgtccagaacaggaaaatctctcaagaaaaagcacattaacggttgcctagggctggagggcatgggggtttgaaagtgacagctaaggggagctggatttctttcggagatacatacgatctaaaattgtggtgatgcttgagcccaggagtttgagaccagactcgccaacatggtgaaaccctttctttactaaaaatacaaaaattagctgtgtgtggtggcatgtgcctgtaatcccagctatttgggaggctgaggcaggagactcgcttgaacccgggaggaggaagttgcagtgagccgagatcatgccactgcagtccagcctgggtgaaagagcaagactctctcaaaataaaataaaattgtggtgaagaatgtataactctgtgaatatacaaaaatccattgaattgtacactttaaatgggtgaattgtatatgaattatggctcaataaagtggttttaatgtgtctcatgccttaagggattactagtttagtatatggtctccagtagtggtttaatgaaattccgtgggagatctcttgagctttattcagagcgttgttttaccctcctagtgtccactccctgctgtctttgcataggagaaccacagtcctgtattcagaggtaaaagtggataagtatctcatgatttgaggatagataggtgtgatggaaagagagttgtcattcacttggtctgccctgttccctaagtgtatgtttgcaccccacacctctgtcatccttgttctgaaatgagtgctattctacctcaggaacatactgatgacccccagcactgtgaaaatcagaacagtgaatggcaagattcaaaggggccatgacaaatattagggaaatggaaaagtagaatgagatccatccattgtggatcaaacctaacagacaatggcagcaagaagtggggagagaagagaaactttctctgaagtcttgcctattctgtgcctccaacaatatgccccttccccataacttgcccaacgaatctcttcaactgtatcctttgtaatatcctttataataaaccagcaaacataagtgtttccctgagttctgtgagcacttcagcaaattaattgaacccaaagagggggttgtgagaaccccatcttttttttttttttttttaagacaggatcacgctctgtcacccaggctggagtgcaatggcacagatcactgctcactgtaaccttgaattcatgggctcaagtgagcctttcacctcagcctcccaagtagctaggactacacaggcttgtacctccaggcacagctaattttactttttattttcttgagacaggtctcactctgttgcccaggctggtcttgaactcttggcctcaagtgatcctccagccatgagccactgtaaatgtctgggaatgccaacttgaagcccagctggtcagaagttctagaggcccagacttgcaactggtgtctgaagggatggcagtcttggggactgagccctcaacctgagggatctgatgctatttccaggcagatagtgtcagaattaaattggaggatacgcagttagtgtctgctgcagaactgattgcttgcttgctggtagggggaaatccccacatatctgggggtcattgaagtctttggtgttgactcttactgtgtttgttgttttcatgtgagagcagaggaaaagcaaggaaatgttttcctctggtcagttttccagaccagtctttacagaaacacacacagagcttcaaacaacactacacttacacagccctaaaagttagtaagtacctctttcagttctgcactccaagcacttcaatgatttcagccttactgtagtcctggtgttgatttttaacatccatctctcagcaactggcaaaaaaaaaaagacaaaaaatatcagtgaagatatatggattatcaaccaacttgataaaattaatattttgcacaataatgcacctaacaactgtaaaatacatgtccttttcaagtgcacatgttatattcaagacagaccacatactaggccataaaaaaagcatccgtgaatttcaaaggatcaaaatcgtacacaatgtattctttggtcaaatgaaattaggaatcattgacaatgaagtacctagaaaacccacaaatgtttggaaattaaacacacttctatataatccataggttaaagaagaaatcaaagggaaaacgaaaatagtttgaactaactgataatgaaaatgcaccatataaaaatttgtggggccaggcatgggggctcatatgtataatcccagcactttcggaggccaaggcgggtggatcgcttgagctcaggagtttcagaccagcctaggcaacagggtgaaacctcatatctacaaaatacaaaaattaacaggatgtggtggtgtgcaattgcatggctgtggtcccagctatgtgggaggctgaggcagaaggatcgcttgagcccgggaagtcgaggttgcagtgagccatgatcacaccactacactccagcccaggtggcagagtgagactttacctcaaaaataaataagtaaatacataaataaataaaaagaaaatttgtggaatggagttaaagtagggattctgtatttaaatgcttatattagaagagaaggcctagaatcaataactacaggttctactttaaaaggctagaaaaggaaaagcagagtaaaccctcggtacccagaagaaaggaaataagatgagagaaaaaaataaatgaaatatataattagccaaactaaaagtgaattctctgaaaaatcaacaaaattgataaaaccttgggtgggcatgacggctcatgcctgtaatcccagtactttgggaggccgaggcgggcagatcacctaaagtcaggagtttggaaccagcctggccaacatggtgaaaccccatctctactaaaaatacaaaaattagccaggcatggtggcatgcgcctgtagtcccagctactctggaggctgagggaggagaatcacctgaacctgggaggtggaggttgcagtgagctgagatagtgccactgcactctagacttggcaacagagcaagactccgtctcaaaaaaaaaaaaaaaagagttgataaaaaccttagctagaattatcaatttaaaaactgcaaagacaaattacatgaaagaacttatcactaaggagcattttagatattagaagtctaacagaattattgcgaggccaaggtgggcaggtcatgaggtcaagagatcgagaccatcctcccaacatggtgaaaccccatctctactaaaaatacaaaaattagttgggcatggtggtgtgcgcctgtagtcccagctactcgggaggctgaggcaggagaatcgctggaacccaggaggcagaggttgcagtgagccaagattgcaccactgtactccagcctggtgacagagtgagactccgtctcaaaaaaaaaaaaaaaagaaaataattattatagacaagtcaacaaatttgagaattcagatgaaatggacaaaatttctaaaaaaaaatatataacttactgaaacacacaagatgaaacagatacattaaggaaattgaggccagacgcagtggctcacacctgtaatcccagcactttgggaggccgaggcgggcggatcacaaggtcaggagatcgagaccatcctggctaacatggtgaaaccccgtctctactaagaaatacaaaaaaatcagccgggcgtggtggtgggcgcctgcctgtagtcccagctactcaggaggctgaggctggataatggtgtgaacccgggaggcggagcttgcagtgacccaagattgtgccactgcactccagcctgggcgacagagcgaaactccatctcaaaaaaaaaaaaggaaatttaatttattacatcaaaaaaagaaatctccaggcctagatggttttgccagataattcaaccagaaatttaaggaacaaataataccaatcttacacacacttttccagaaaatagggaaggagaggacagttcattttttgaggccagtactaccctaataccaaaacctgataaagatattacaaggaaagaaatgacagaccaaaaacctcatgcaaaaattcttaagaaaatggtagcaaatttggctgggcatagcagctcgtgcctataatcccagcactttgggaggccatagcgggtggatcacttgaggtcgggagttgggagaccagactggccaacatggtgaaaccctgtctctactaaaaatacagaaaaaaaaaaaaattagccaggcatggcagtgcatgcttgtactcccagttacttgggaggctgaggtgggaggatcacttgaacccgggaggcggaggttgcagtaagccgagatcatgccactgcactgcagcctgggcaacagagcaagactttgtctcaaaaaaaaaaaaaaaaaaaaaaagaaaggcctggtacagtggctcacacctgtaatcctagcactttgagaggccaaggcgggcggactgcctgagctccggagttcaagaccaccctgggcaacatggtcaaactccgtctccactaaaatacaaaaaactagctgggcatggtgacacgtgcctgtagtcacagatactcgggaagctgaagcaagagaatcgcttgaacctgggagatggaagttgcagtgagccgagatcacgccgctgcaatccagcctgggcaacaaagcaagactctgtctccaaaaaaaaaaaaagaaagaaagaaaaaagaaaatggtagcaaatttaatctagaaatatgtaaaaaggttacaaaatgaaccactaatacaagatttaacaaaaaagaaaaagagaaatagaaaatgctgagctagaagcagttgggttggctgggaggcaggattccatgtaggccaatgacattttgaaatggcattgttttctgcttaacagttttaaaaatcaattttattcatattagttgaataaaggagaaaaaaatatgatcactttagtatataaaaaattatcggacaaaatacaatatcccttcatgatgaaaactctcagcaagctagaagtagatgagaacttgttcaatttgatagtctatgaaaacttccagctataatatagtgatgaaatattaaatacaatcctcctatgataaaaaaggcaacaatgcctatctatgactactaatgcaagtcctagcgattacaataaggcaacaaaataaatgaaacctataaatactggcaaagaagaaaacttcctctgtagatgactcaagtatttacttaaaaatcctaaagagtagattcttttttctttttatagatagggtctcagtctgtcacccaggctggagttcagtggcgtgatcaccgctcactgcaccctcgacctccccagctcaggtgattctcccacctcagcctccagagtatcggggactacaggcatgcgccacctcacctggctaattttttatagagatggagtttccaccatgttgcccaggctactcttgaactccagggctcaagcgatctgcctgccttggcctcccaaagtgctgggattacaggcatgagccactgtgcctggataggtcccaatctataatcgaatgaaatcagcttcttttaatcatccgtccaccatcttttggatggtccaatacctcttcaagagctttcattttactgttccgaaaaaaaagggctgaaccgatagtggatgctaaatattaatgggaaaatagagggatccattaggagaatcttgggctgtttggcatcatcactcactggaactggggacaacttcttagatctctgttacataggacatttcaagataagataatgtttacatgatctaaaatatgactgtgtttaagaagtagagacaaacagttcaccaaaaccatggctaaaaatggttaagaacttgtcagtcttcctcaggggtcctctctttgcagaagcactgagaccacagaggcaagagctggggaaggaaaactgcccatgagatgagatgtgcctctcagcttccaaaatcggggaggtaagagggattctggacaaaatgaaaccctgcacccacaaggagtccagcagacagatgtagacaccaagcagacatcctcataatctaaaagtagggtccagacagcaagtttctggcccatcccacactctgctaatgctgacctggacctaaaattaagccactcaaccctatcttgagataacagagggagaaaatgctccctccattttactttctagggttgcaaagggatgacaccatccacaccagaactgcatgaatggcatcaggaatgatcagagaccataaattccagtgagaccaataacaccatttctggtcctgcatgctcttccaaactttgccactaaccccttcaagaggtacagtctatttccctttctcttgaaattgggtaggcctttgggactcccttgataaacagaatacaacagaaatgacactgtgtatctaacaaggctaggttagaaaaggcaacagaacttcatcctaatctctctcaagatgccccccatggaatccagccatcatgctgtgaggaatccaagcagctacatagaaaggccacaactagatattccagctgtagtcagctgaagctccagccaacagccaacatcaaccaccacacgtgaaaacgagcaagccttcagatgattccgactcccaacctccaagccacctcagctgaagccaagtagagcagagactagctgtcccccaatgctctaatatgcagattcataattaaaaagaatgttattgttctaagccatgaagttttggggtggtttgtcatgcagcaactggaactgcctgatcacaccacacacacaaaagcagaaaacaatgccatttcaaaatggcattgggccacatggaatcctgcctcccagccaacccaactgcttctagctcagcacttcctatttcttttttcttttttcttttttttttttgagatggagtcttgctctgtcacccgggctggagtgcagtggcacaatatcggctcactgcaacctccgcctcctgggttcaagtgattctcccgcctcagcctcctgagtagctgggattacaggcatgcaccaccatgcctggctgatttttgtatttttaatagagacggggtttcaccctgttg[132 bp omitted]tagcattggtcactacctcttttctcagtatccaagttgaagaagagtgaatttatgacctctgcagcttgacaatatttacaaagaactctcttgagaagtgctttataaaccttgtcatttaatcctcatgcagctctataatttaatatattatttccattcaacagagcaagacacaaaaggtaaagaaagcaagtaagccaggtgcagtgactcatgcctgtaaccccagcactttgggaggccaaggtgggaggactgaggccaagagttcgcgatcagcctagacaacatagcaagatcctgtccctacaacaaaacattaaaaaattagccaggtgtggtagtgtgcatctgtagtcctagcttcttggaggttgagctacttgaacacctgagcccaggagtttgagactgcagtgagcctcatgattgtgccactgcactccagcctggacgacagagcaagactctgtctcaaaaaacaaaaaacaaagagggcaagtaatttgcctaaatttcagtaagtgtcagacttatattctctagttggatgtagcatatacctacaatatacatataatattgtctagttggagatagcatatatctacattatacatatctatatagaagtataaataaatatatatggtactatatctagttggatacagtattctatatatgtcaattaggtcgtttgctcacctccatcattaataatttctagtctccttattctaagttactgaaaggtgtgctaaaatctccaatgatgactgaatttgtctattcatcctttctcttttattgacctttttatatcctgaagctcttttttttttttttttttttttttttgagacagagtcttactctgtcacccaggctggagtggaatggcatggtcttggctcactgcaacctctgcctcctgggttcaagaacctcccaggttctcccgcctcagcctcctgagtagctgggactacaggcgtgtgccaccacacctggctaatttttatatttttagtagagacagggtttcactatgttggccagggtggtctcgaactcctgacctcgtgatccacctgcctcagcctcctaaggtgctgggattacagacgtgagccaccgcacccagccttgggtataaacttttatcattatgagctgcctccatgttatctctcataatatttttggccttaaactctatttttttgacataaataaacatcagcttttgttggtgtttgcattaccaccttcatacttttgctttcaactttttttttcttcttttttttgagatggagtctcactctgtcacccaggctggagtacagtgacttggtctcagctcaccgcagcctctgcctcccagttcaagcaattatcatccttcagcctccagagtagctgggattataggtgtgtgtcaccacacccaggtaatttttttaaatttttagtaaagatggggttttcaccatgttggccatgctggtctcgaactcctgacctcaagtgatctgcccgccttggcctcccaaagtgctgggattacagatgtgagaccccacgcccagccttgctttcaacttttctatgtcattatacttaaaagtgtgtcagctactaaaagcatatggttgattttgttcttttcgtccctcgctctgtcacccaagctggagtgcagtggctcaatcacagctcactgcagtcttgacttcacaggctcaagtgatccttccgcctcagcctcctgagtagctgggattataggcatgcatcaccacactcagctaattttaattttttgtagagatggggtctcactatgttgcccaggctggtctcaaactcctgggctcaggcaatgctcccatctcacccctcaaatgctgggattataggcatgagcaactgtgcccagccaatagttaatctttttattgtttagtccagtttcattaaatttctttaatgtaatgtaaattactaatttaattactatgttggaggtaagttcatcaacatttacttctatgtgtccccctctttttttgttgttcttttattcccccattcttaccttttattttattggtcaaataattttattattctagtttgccatattagttcatactgtcatgcactattattttagttaccataaagattataatactgtgcttaacttgttacaactaaaattctcatgcagtgcttctgacagcataagtacaaccacagtggaaatgtttagcagtatctacgaaaactgaacatacatacatcatacaatccagcaattctacccctgtttatctccataatgtctgtgtgcaggggtgggggagaggattaatacttatgtgcatgtctttgtccatattttgacaataatggtcatactagcagtatttctatagaaaaatttgaaacaactcaaatttccaacaatagaacagataaataatctgtgccacatcctacaatggaatactacacagcaaaaggaaggaacaggtacctgctatatggaacaacatggatgaattttacacagatattgagtagaagattattttacttatgagaagttaaaataggtagatattaaaaggagaggtacatgaaggaaatatttttattcagtgggaccccaggagactggataaattatccagatcctacattattgcctgaacaggtagatttgagcaggctgcaatctgttcacccaccaaaagcccatgccacattcctgtagatatctatacttaaaatgacaaagacacacgttcctagagggtcttggaagcgggtataaagttggtcaggtcacgagagctgcacagccagtacaaggaattgcctgggtaggattcagctttgactctagtaatagctgactggttatgcatccttatattagcattgcttctctgtattctctatggttttcttttcatttaagactacttcttggctgggtgcagtggctcatgcctgtaatcccagcgctttgggaggctgaggctggaggatcacttgagaccaggagttcaagaccagcctaggcaacatagtgagactctgtgtctacaatagtaaaaaatattagccgggccgagtgacatgcacacctgtagtcccagctactcaggaggctgaggtaggagggtagcttgagcccaggagtttgaggctacagtgtgccttgattgcaccactgcaacccagcctgggtgacagagcaagaccctgtctcttaaaaaaaaaaaaatggttgggaggttatgtacagttgcaaataagaacaaaagatgtgattaaaactttcaatatgttaatcttagctctgaaagttactaattctgtgctttgacaagtattttattggcattacctagatttcctcatcaataaaattagaaaaacaacagcaccttgtacctcacagagttgtcagaattaagtggaaaaaaaactaacaacaaatcactcccatggcacataataagtacctaaaaatcacctaataaatatcatctatttgtattgatgatgaaaagactatgtcatgtcatataatctattagtattaaagaaaagtgtcttctgtccttaacatgctttctgaggcctgctctttcttataaagctaatatcttacaaagcacagcctgcaaatgtaattagtcttcactaacaacattacccacagattttttcaaaaagaaaaggacagcagctagagagaagtcattcggcttataaacatagctcagagaatctgacccaaatagttaacaaattgaaaatattaacaaaagatcagtcttgttccttggccaatccagtcttttatgcctatttgtaactattaacatcaattctgttatcagaaatcataaacccatcctcagcagtgtgatttatataacaaagtctcctaagacttctggtcttgaaagattaatgctgtcttgtgaaagttacctaagtctgtacaaatacatacatacatatataattctgactagctaccttacttagctgcctacctgttctcctggtaattatgcataaattaatatgtatataattctaaaaggtgtaaatactcagaatgtttgtcaaatcagttgggcatcaatgacacttcctttttatccctacacacatggaagtctaacaaaagcatgactgatttgaatttctttttcaagctaagagtagagaggtcttctctcattcaaatgactaattcatgtgaatctttctgaaaaaaacaagaacatattaacatatctacaaggaaaaattgagaagaatgtacaccaaaatattaatagtgaacattttctagataataaaactatgagtacttacaactttctattttataagtcaacttaggttactgaatttttttcaattagactgcattaattccatcatcaggaatgataaaacctaaagcatttttctaaagagctgggagggaaagctatcttttacttattaagaaaactgtgagcaaacaggctggcaaaatgacacagagcagcactaaaaccaaactgaccaaaataaacaagcctaccaagtcttgcacattctttttttttttttctttttttgagaaggagtctcactctgttgcccaggctggaatgtagtggcacgatcttggctcactgcaaactccgcctccctagttcaagtgattctcctgcctcagcctcccgagtagctgggattacaggcatgtgccaccgtgcccagctaattattccatttttagtagagacggggtttcaccatgttggtcaggctagtctcgaactcctaacctcaggtgatccacccaccttggcctcacaaagtgctgggattacaggcatgagccaccgtgcctgaccaagtcttgtacattctcttcccatatttcatcaatgtactgagacatttccaatattaagatttttgttcagatgtgcaaaattgaggtaagtggccctttcacactgaataaatactgtttgggccacagtggaggcttaacaaatgtggttttatcattgcctttctttactgaatgaccagttaatataatccttgaaaagctgctaataaacgcctatcatagttcaactgatttataatttagcaattcattgtgtacttttgctcacaaatatgaatgttatatgatattccatcttatattttttatattagtatctccaatttcttattatctatgtagtattacatcacttggatgtaaactgactgacttaatatttacataatacaggaaattgtttttggacaaactcttcctaaagttcatttccaggtgttatagatcagtggttcaaaacatttttgggttgtatatacccttaatactctcataaaattagagacttttgccgaggaaaaaatacgcatgaataaaataaacatacaataattaggtatataattccaaggcaaattattccaggtgaagtatccctgttctagacagagcatatttgtgagccactgcacttgaactccacaaatttttgaattgcatataattttcacatgtcatgaaatattattctccttttgatttgttgtcaactattgaaaaagttaaaatcaatcagttcacaagccatacaaaaataggctacaagcagggtttggcctacagagccatagtttgcaaacccctgctatagacccagagaccattataccatacacaggctacacaattatgtaacttggaaaaaaaaaaagacacctcatgctgccaaacctcatgcaagaactagctgggtaccacatctccatctcttaacatctccatatcaaacacaggctgtgctttttctgttggaaccttcatcctatttccttaattacaagtgtaatttttttttttttttttgagacggagtctcgctctgcctcagcctccctgagtagctgggactatagacgcccaccaccacacctggctaatttttttttatttttagtagaaatggagtttcaccatgttagccaggatggtctcgatctcctgacctcgtgatccgcctgcctcggcctcccaaagtgctgggattacaggtgtgagtcactgcgcccggccacaagtgtaattcttaattacaactgtattcctagctacttggaaggctgaggtgggaggactgcttgagcccaggagttccaggctgtagtgagctatgatcgcaccactgcccatcacaattaacctcatattttcattgcaccttatatgtgaatgtggaatgacttagaatatccacataataaggttttaaatttaagcttaataatttattattatcagccaccgttttgttactctgttaatagtaactttgctaatcctcataaaaatcctttgaaattggtactattattatataaataataaactatagaacagaaagatattgagtatattgcccaaattcacacacagtattaataattagcaaaaccttagattttaattcagatactatagaataggggttggcaaacttttctgtaaaggactagatagtaaatattttaggctttgtgagctaaaaggcaaaattaaggatattatataggagtttatataaaagagagatgaaaaatttcccctttgtttttcctttttt[134 bp omitted]tctcccaggctagagtgcagtggcgcgatctcggctcactgcaacctccgcctcccaggttcaagcaattctcctgcctcaggctcccgagtagctgggattacaggcatatgccaccatgcccagctaatttttgtatttttagtagagatggtgttttgccatgttggtcaggctggtgtcgaactcccgaccttgtgatccacccaccttgacctcccaaagtgctgggattacaggtgtgagccaccgcgcctggccacctccacaaatttttaattgccaaaatccaaaactttatttatggacacaaatttaaattgcatataattttcacatgtcatgaaatattactctcctttttttttttttcgtggtcaactattaacaaaaagttaaaaccaatcagttcacaagccatacaaaaatacaggctacaggctggatttggcccacagggccatagtttgcaaacccctgttctagacccagagaccattataccatactcacacagtcta[132 bp omitted]ctgatcaacatggagaaaccccgtctctactaaaaatacaaaactagccaggcatggtggcgcatgcctgtaatcccagctactcgggaggctgagggaggagaatcgcttgaacccagaaggcggaggtttcagtgagccaagatcgcaccattgcactccagcctgggcaacaaaagtgaaactccgtctcaaaagaaaaaaaaaaaaaaacacgtgatgcggccaaacctcatgcaagaactagctggtaccatataaatctcctaaggtatcccctcggaaaaacttcctgcccttcttaacagctctctctgcacatactctgcaataatattctaactcctaaggtcctctaaaacaaaaaaagttactataaccattcaaacgatctcctatcttgctgtttttccactcatgtctctgaagaaaatctaaactatctaatgtgtaattctacctaagcaattggtctcctccgtaacaaatcaccgtgtgaaggcagactatttctatgtcatgagaatgcttaaacaaaaagagcacacaggagaagtgaacatactgtcaaggtgttatatgaaaattaactctaggaagggcatctgatgaggtactggaaagaaggagatctgtcttcataatgtcatcagtaactgggaagagaaggactagagaccaggtaaatagataagtcactatttggtgagcatttcaaatgaagttattccacatcctgaaaaacaaaaatgcatttcataaaacaaagaaaaaaatcaaaatgacctccagctttgctttaaaatgtgcaactacaatgcttttcttctctcagagctcttctcttggaatacagcaaaatgtggaaagaaagggaatcacaatatactcagcctttcttggagcccagacaggctaaataagaacacattcttcaccaccggcaagcttccataacccatgctgaatatgaccagatggaagtatgagaaagactggaatattgttgactcttcccttcataaagaaaagtcaggttcaccaaagcctgggactgaaatgtttctgtattcacaataatttcctttagacagctatgaaaatgctgtggatctgcaa[135 bp omitted]caacatggtgaaaccccgtctctactaaaaatacaaaaatgagccgggcatggtggtgcatgcctgtaatcccagctactcgggaggctgaggcaggagaattgcttgaacccggaaggcggaggttgcaatgagccgagattgcgccactgcactccagcctgggcaacaagagcaaaactccatctcacacacacacacaaaatctttggagaaacgaatcctactcctggggcctcaatatcatatcttcccagaaccttgccttgggagcaattccagctctaacatctccatatcaaacacgaggctgtgcatatcagaacacagccttgtccatgtgaaacacaaggctgtgctttttcagttggaaacttcattctggatctcaaatatccaactttcttttcgatagccatttgactgcacactgtgcaacgtggttataaggtgaaatgactgaggcagtgaaagaaatcccagtataacaaactccaagaaaccacgtaacttaaaattggccccagaggttggcgaggctgcatgccactgtgtattatgcattatgaaagcgacaggggccatgctttagaacagaaggtctcagagtcttcacagacacagatcgagccatacggggaccttgtccacgtattcctgagccccagaactgcagaaatcaaactctacaaaagctgcaccaggccagttttgatcacagtctccagtgggtcacaacagcgctgtcacaggatcactgataacagcatgacacattcatagtcaccgctcagcgccgtcacacaaacggccccgcccccactcagtcccgcgggcccaatcggggacagtcagggctgtcccgggctgtgcacctgctgtgcacacacaccccctgctgtgcacaccccccgcccccccgggaccatcacaggcgcgcccactcacaccaccacacacggacgcagccacagaacggcacacacaaacacaatcacacagtctccctccccagcaggtgacttgcacacaggcctggggcttctgcctccacaaaccctctccgcgtcccatgaacccaggtcccctgccgtgagctcttctcgcatccagacccgggtcacctcaactcaccacatggaaaacgaacaccaggtcaacggaaaagggagccggggtcctggcagaagcgtagtgccagccgcaatagggcggccgtgggtgcaaacggaggggagcgccggcagctagcaccgcgcggcgactaacgggccgccccggagactcctgggagctcaggcccacgcgcgagtgcgcaggcgcagacgactcaccctgggccgggggtgaggcttggtgggtgccaggggtgctgaggaggccaaggagggcactgggagctccgttccgggagagctgtctaaggacgcggaaccgggtggggaggccagggaggtaaccaagagtccgagccgggcctggaaattctgaggaggaaaccgggaccgcggtatccagacgctccgatctgtacgagccgggcctcgggcgtggtccatgggcgtgaccttgagggtgacccggagcgagctccgcgaagggggattttgcccgttctgatcccgcggaagcgccatcgctggcggcgggtccccgcgcggagcgggcgctgtgtgttcgcgcgcgcgggcgcgcgctgaataggggtggcctcctgcgcccaacctgctgcattttaggtgcttgcctctctttgggatgttgtggccgattgtgtgtgaaaagtgaacggagtagtgttgctgcgcgaggtttcctctgcgtgtgtctatttttagattaggtgtgagtcgcatttgagactgcctttgagtgtggagaattgcaagtgatttgtaggtgtggttgtgactgcctggagtcgtgttagctgctgtctgaggttgtgaatgacaagtggggcctgtaggttggtggttctctgaaggatgtttgattgactgtgactctgcatgtgtttgtaacctactgttacttctggtggttttgtggccttagtgacctaaatatttgaatgattgaggaactctgttatgaccatggctagttggttatgtaagacttgattatctgaatagtagccattaagcctgcctccaaaactgtaactaagtagcaatttagcaaataaaatagagataacagtatcagaggggaagagatgattttcataattcccagattcatttcctggaaacaccatattaactaaaaccagtatgttgaaatgaatagcattccattggggacatgcaggaaattttttttttttttttttttttaccataactaccacttttgttgttgttttttgtttgttttaagacaaggtcttgctcttttgcccaggctggagtgtagtggcatgatctctgctcactgccacctctacctctgaagttcaagtgattctcctgccccagcttcctgagtagctgggactacaggcttgtgccaccacgctcggctagtttttgtatttttagtagagatggggtttcaccatgttgcccaggctggtcttgaactcctgacctcaagtgatcccctccccccgccccctcggcctgccaaagtactgggattacaggtgtgagccactgtgcctggcataactaccactttcaacacttgtatatgagtgaggtttcctactcccttaggcttgctaagataataaaaagtatttgatagatttttaataagtccagtctcactgtagtaattaaaatagttattttgcgggcctggtgcagtgactgatgcctgtaatcccagcattttgggaggccaaggtgggcagatcacctgagatcgagaattcgagaccagcctgaccaacatggagaaaccccatctctactaaaaatacaaaattagccgggcatggtggtgcatgcctgtaatcccagctactcaggaggctgaggcaggagaatcgcttgaacccgggaggtggaggttgcggtcagtcaagattgtaccattgcactccagcctgggcaacaagagtgaaactctgtctcaaaaaaaaaaaaaaaaaagattattctcaactacaacatagaccagataggcaaagatttaaaagttgtcaactgtcttcatcagggcttgggaaggtattctcatccactactatcagtgtaaattggcaaaaagtccaagaagaaccgtttggaaatacacagtaaacctgtggttagaggtagatggaaggcagagctgcagagggaaaaacacagtgttccctctcttcaagctaaaacaggttccccagaatcctgtatactttaccaagagactgggtttctggtgtttgtgagggagcctgatttgtctgttttcccactaactaccatcctggacatctgaagggtacacagggtggacaagtgctgaaatagtgaacattcatgcagatttaactgagttaattctgggagttctgagtcaagtatggtctcacatacgtatatcctccatctttgctttctcaggactgtttctttttccaaaagaggagctcaaaagagaaagttcatctagaaatctcaaagccatgtctcaggtgagatgatgtttcctctctttctgaaataactttttttcatggtgtatgaacatgagcttcactgtcctttaaccttccctgatattgggatttgcttccatgaaattagtcttcagtcagggccagattaggctgaggcaggcaagtggcatgaggtgaaatatttaaggggtaccctcagggctgtgccctcctaaattttgcattctaggtgcctcacctgcctcaccctgtatccagccctgttcacaatttctccattccaaccaaatcaacttaagccttccccaagtgtaccttctggttgtacatattcattgggtatatcattcatcatctcctttctcagtcttctcacaaacaaactgctggaatagaaaggtattgtcttgatttaaatgggaatatatggcttgaatgaatttaacttgtcctgatgctgatttgagacctaagctgtgagtagtcatggagcagacgtggaaaaaccttgatgatctccgctagcctaggttttgcaatggtacgttgggaaatagaagtggtagatcccagcattagtttctggaaagatgtcctgctttgtgaggtgtttaggatagcaatttgattgcaggcttgtaaaggaaacacgttttatgttcctcctctctgatcttttttcattcatgtctgctagccattcctacaaattgtgggctgccagtgaaaacctttccagtattccaatgctgttagagatttgttattttctttttagtttcttctaattttttatttgcgggtgcaggagaaggaaatccatatgccaggccacttttgaaatattctattgttgatcaaacagtactttgtcctcttttcatatctttcagaaaattcctctttagctcatccaccaacctttaaaatactggttttcctcagatgctaattggttctcttcttcttcacagtccgtttttctctacgcacaatcagattcactctgaaggctacacttagtgtgattctagtgactctcaaatacccctctccactctagacctctgtccagagtgtcagaaccgaatattcaacctccagtagctatcaccacctgtatgttccacagacaaagtacatttccaaagcttacctcattacttcctttggtccagcttacattttcttccgtttcccattttcactttctagtcccagcagccatgcatttgcctatgcagataaaatgcctgtatcttttccactctacagccaatttacgaccatctctgttgtaatggtggtcatgtaggagcagttgtcctctgtcagcccgctgacacttccttaatctaggagacatttctaaccatggttacttaattgtcatttccacctaacatgtgataagccttttccagtcttcaggagtattacctcaaaacttttatcacataacgtgtgtcaacttatgtttattgatgttctttacattccttaaagcaacagacccaaagtagggcatgcctcacagtagaatgtataagacggtctattggaaggaaataaaatactaacaatttacattcgagagcagtattcattaacaatgtagattttcataaatgcctattgatggtttataaatagctacaatgttgggaatgtgttcagtatatctttaagaccactgttctgtaggaaaaaaaaatctagtatcatgtcataatatccccattgcctatctccatataccttttccttcttagagctcaaagactgtttcctaacatactgtgccttttgctatttcctgatttactaactggtttttttctccccatgaatttttaaaagctgatgccctgtattcctacaaaacaaattcgttgtgagtacaaaacttttatgtcctcaatgaagcctcggagtacaaaatgaaatttttccttgttttgtgacactttaccttgtacgtatttctgtcattgcatctgtaaaacctactaagtgcatgtatttacatgtatgcccctctcttagcctataacttctcatgagcagggtcagggttttattcattttggtctaccaggcaaccagtcacattcaggacaaatagtgtgatctcagtatgtttagcatgagattataagtaaatacaaatggatgtattttcagagagaattttatgcaatataaaacataaataaggaaactagtctgaccagtaaacattgtcagtactaggtctccaatatctagttctcacacatttccgatcacttcaggatgaactagagtatgcccttacagggatcagtgtcattcaaggatgtgactgtggacttcacccaggaggagtggcagcaactagaccctgctcagaaggcgctttacagggatgtgatgttggaaaactattgccacttcgtatctgtgggtaagaaacactcctgaatctttcactgtcatgcatctccttctaagaattcctgaaacatataggactttgaatttcagg[136 bp omitted]catggtgaaacccagtctctactaaaaagtacaaaaattagctgggtgtggtggcacatgcctgtaatcccagctactctggaggctgaagcacgagaaccacttgaacctgggagacgaggttgcagtgagttgagattgcaccactgcactccagcctgagtgaaagagtgagactgtctcaaaaaaaaaaaagaaaagaaaaggaaagaaagaaaagaaaatatgattatatcatcacttgtgtagtgtaaggtattaactttggtaagacattaatgtatacctcatttactaccttgaagttgtatctttatcttacttcaatagttttaaagtcgaaacagcttagaccaaaagtctcattttccatcatcagggtttcacatggctaagcctgatatgatccgcaagttggaacaaggagaagagctatggacacagagaatttttccaagttacagctacctaggtgagtctataaatgaagtctagtgaacattaaatgtcaagtagttgaagcctttgaatgtttttagggatctatttttgttattgtggtaaaatacacataacattaaatatgctatcttaaactttttaagcatatagttcagtagcatcaagtacattcgcactgttgtgcaaccatcaccaccatccatctccagaactattcatcttgc[134 bp omitted]atttctggctaacacagtgaaaccctgtctctactaaaaatacaaaaaaattagccaggcatggtggtggacacctggaatcccagctactcaggaggctgaagcaggagaattgcttgaacctgggaggcggaggttgcagtgagccaagatcacaccactgcactccagcctaggcgacagagcgagactccatctcaaaaaaaaaataaataaaaataacttccctttatccctactccctagccatgccaaccaccattctacttgctgtctctgtaaatttgactactctaggtacctcttgtaagtgcaatcacatagtatttatcctttttctgactggcttattttacttaatgtaatgtcctccaggttcatctatttccttcatttttaatgctgattaatattctgttgtatgtatatactatattttgcttattcattcatccgtcagtggtccgttgggttccttccatcttttggctattgtgaatattgctgctatgaacatgggtgtacaaatatcagttttagtccctgctttcagttcttttgggtataatctcagaagtggaattgctgaataatgtggtaattctgtgtttatatttaaggagtcaccatactgttttctatagcagctgcatcattttacattcccaccaacagtgtacaagggttccaatttcttcaccagcacttgttattttctgtattttcgtagtatccatcctattagtgatctatttttaaagacctgagatctgtaaagtgcctatacatggctgactttcatgcctctaaaatgtaaattttaggtatgaatatcactccccatgtaaatcttttcgttgtttgcctgggtttgtggaaatattgctgctattaccttaccaagaatctattccatgttttataggtataatgtacatagagatgtaaagtgtaaagttctttgaattctgacagaaggataaacccacgtatctcacactccaatcaagataaaagacagtttcattaacccattaagttccaccaggcctcttccaactcagtccctcccattaagataatcacagttgtgatgtctaccaacatagattcattttgtctattgcaaacctttttcatgtctgctttctttcactcagcttcatgtctgagagatttatacatgtttctgcatgcataagtagtttgttaactgtggaacagttttccattgtacgagtataccagtttatgcatctcttgttgaaagacatttgggatgtttctagtttagacctattatgaacaaagctgctataatcattcttgtaaaaatatttttgtggacatacatgtttatttttcttcagtaaacacgtagcagcgatatcgctgattcataaggcagatgcgtatttcatttctttagaaactaccattttggtttggtagtttagtagctaaaactactataccattttagactttcatcagcactgtatgagaatgttgattgccccacgttcttttctacattttatgttcattttgtccattctggtcattttgaccattctggttgtataacttcgcagttttaatttagatttatcttacaactaataatgttgaaaactttttcaagtgcattttatatcagaggcatctgttcaagtgttttgtttgtttctttgttcgtttgtttgtttgataatttttgagacagagtctcactctgtcgcccaggctggagtgcagtagcacaatcttggctcactgcaacctatgcctcccgggttcaagcaattctcctgcctcagcctcccgagtagctgggattacaggcgtgcgccaccacacccagctaattttttgtatttttagtagagacggggtttcatca[136 bp omitted]gtatttttccttgagtagtaggaattctttacatactgtggatagaaatcttttgttcaatgtatgtattacaaatattttccctagtctatgacttgcatattcattttaatggtgtcttttgatgaacagaagtttttaactttggtgaatttcacttaatcattgtttcttttatcattaattatgtgacctctcaaacaaatatttgtctttttctaggtatagtgaggataattctcttttctaggtatggtgaggatagtgctctgtaatttctttgtatattttgcttttttttttttttttttgagacagagttccgctcttgttgcccaggctggagcgcaatggtgtgatctcaactcaccgcaacctccgcttccctgcaacctccacctcccaggttcaagcgattctcctgcctcagcctcccgagtagctgggattataggcgtgcaccaccacgccccgctaattctgtatttttagtagagatggggtttatc[131 bp omitted]ggtccacctcatgttttgtttatgatgtgaagtagggttcgagagtctattcttctatatggttatcaatttgttccatcagtatttattgactgaattactatggtgatcatagagaaaattgatcacatttgtatcagtctatttttggacaatctgttgtttccttggacataatttaagtcacattgacaataccacctggtctttgattattgtaactttataataagtctggaagtcagttagcgtaagtcctctaactttatgctttttaaaaacttttagggccaggcatggtggctcatgcctgtaaccccagcactttgggaggccgaggcgggcggatcacctgaggtcaggagttcaagaccagcctggccaacatggtgaaactccgtctctactaaaaatacaaaaattagccggatatggtggcacatgcctgtagtcccagctactcgggaggctgaggcaggagaattgcttgaacccggaaggcacaggttgcagtgagccaagaccgcgccattgcactccagcctgggcaacagagtgagactccatctcaaaaaaagcaaacaaacaaatgaaaacaacttttagctattctatgtcattttcttctcaaattcattttggaatcaacttcttgatttctttagataaacgtgctaggttttttattagtgagagctaatgtcttagcaatattgagtcctgtggttcatgacaatgctataactttccattttagttagcttctctaattcctgaaagcaattcctatttttggtatagaaatcttacatattgctcattaagtttctctctaagcttttaatatttctgattctattgtacatagtaagagtggctgggcatggtggctcacacctgtaatctcagcactttgggaggctgaggtgggtggatcacctgaggtcagaattcaagaccagcctggccaacgtggcaaaaacctgtctctactaaaagaatacaggtggcacacacctgtaatcccagctactcaggagctgaggcaggagaactgcttgaacccgggagtcggaggttgcaatgaaccatttctttctttctttctttcttcctttcctttcctttcctttcctttcctttccttccctttccctttccctttccctttccctttccctttcccttcctttcctttcctttcctttccttctttcttttttttttttttttgacagtgtctctctctgtcgcccaggctggagtgcagtggcatgatctcggctcactgcaacctccgactcccgggttcaaatgattcttgtgcttcagactcctgaggagtagctgggatgacaggtgggcaccaccatgcccagctaatttttgtatttttttagtagagactgagtttcaccatattggccaggctggtctcgaactcctgacctcaggtgatccgccacagcctcccaaagtgctgggactacaggcatgagccactgccccccgactatttttagtagttttaattacatatagtaattataattttaaccattagtaaccttttaacagagtaaactaagaagtagatagttgtgaattatctgctacatactagcattctataacagattggcaaatgttatgaatacatcatcttacaactttatagatacatatttcctcatagtacaattttttagtgtttaacagatccaaagagcttatccaaaactcttattccacttatattgacctacacagatagtatttattatgtttggattgttcatgaaaattttataatacattaaacaaaactagccagcctctcaagtcatttccttgttaactgtttttatagcacatacaagtaaaaggcaattaaaggcaaatcaagaaaacctgaaaagttaaatacataggtttgtttgttttgttttcctgctgtgtttgatgtatatgaaataatagatatcagacaattcatttctactatatgtttatttgtgcatttttttcttaagttgaatttatagtttttatagttttaaacatagtaaatataatagtaacttatttgactagtaaagccaagtagaataaaaatatgtgctcatagatgcacctctttttattaaaccaacaatattaaactcatcttagttatcaaaattttaccccaagtcacatgaacttgaaaggcctttgggttagttcctacatttctgggggtgttaggaacatttcacttatataaacactcatttttctcttaaaacaatttgaataaactctttaagggagtttataaattaatttggccaagtgttgtggctcacacctgtaattccagctactcaggaggctgaggcaggaggatcgcttgaggccaggagtgtgaggccagcctgggcaacatagcaagacccagtctctgaaaaaatgtatcccagtgcagtggtgtgcacctgtagatccagctattcagaaggctgaagcaggagaatcacttaagcccagaagttcaaggctgcagtgagctatgcactactgcactccagcctgggcaagagtgagacctcgtctctaaataactaaaatgtttaaataattaattaataccatctagaggtaagaaaatatcacatatacataacatacatacatagacatacataggcggacagacccaaacagagatcttataactttcattctaaaatgttagccaggagtcagtaaaatagtattacactctcatctttgctccactttatatttttatctgaatagtgtttctgacacatggaacaaggttagctgttcaatatgtgggctaatgctttttagccaatatttgtagagattttcagattttcatttgccctgttatgtaatcttatggaagctgtggactaaattttaggtgagcaactgagctatctggatgtctccaaagcttggctgagtgaataaaatatccactttgtttccagttagcccttttgtccttctcagctgcaggtagtttcttttgggggccccttgagtgcccccaatgtggggcagggcacctaaagttcaagtgactgtaggggctacagtgggaagggaaaggtcagcagggtggacagagggatggaggagttctgaagggccacctgtcaaaggattcaggggaactgaagggacaatcagaggtggtgagaggaggaaggaggagtggagcagtgggaaaagagaggtcttacaggagccagtgtagagaatccttagtaaagtaatgccaagaagaaaggaagtagagggagttggcagagcatataccaacaggggaacatacaccatcaatcaactgagaagttcccatgggagaaacaggatcaaacaggcctcacagagtcaggaattttctagccctgagagtcaggaagtaaattcccacccaaaagaaaaacccaggaagaaagacttctagcccagcaggtaccttttaaacaaagaagccggtgcctgtaacccaacttcatataaacaagaggagcctaggattctaacccagcctctagagtatgctcagaatctaaggaatcaaaatgttgtaccagcttcaatgggagtttgtccagagtagtggaccaggagtctgactcaccagtgggtccccagtcagtcaggagtgaagaccaaggctcaaaaggtgtgcacttggggtcctgggtgagatgccaaggggtccaataatcaatctgttcctatccaagctgtgttactataaatactaaagaaaaacattatcctgacacttgtaaggcagatctcagggactgctacaatggggttttgaagtactggggagagaatgggccaactctgaatacgataaggaagagaggaaatttatagttgtgggagggggcagtgatgggaaattactgagtggatagggtaatcttgcttagctgacctaccaggattcctactgaaagcaggtcatggtgatcagatatcacctggaggggttggtgaggagagatatcagatattgagagtgggggattccagctaaaccgacttgacagaattctcgctaaaactgggcccttcggtggacatgcccaaggactgggcctaattggttaaagttttatggtattgtcctgagtcctgggatgcagtctttactcctaaaacgtggcccttctggagtctcgatggaaagaccaagattgttgtgctttgttgctttgttttgttttcacctagcccaggacaaaaatgaatggaccaggattttttgttcttttgttttgttttgtttgcctgtttttccactctgctttaaaattttcagtgcatttaaaaataccagaaagggactgccccatattggtcttcatgaatccatgctgaactactctcttttattataacatttccagtttgcttatattgggaccaaggttttaacaaggttcttgttgtcacagggctagaattgcaaactctttttcagagctaaacagccactgaactctttgctcagttccttcagggctctagctttctttcctctttgggctccttgcaatcttgccctgcagcaatgtagttaaccaaggctttgaggatggcttatgccaactttggggctctgcttttttgacttctccattcccagattttgtcttcaagttagggtagctctgaactctaacctctgattcccctatacagatgacttgtgctttctcctggagatctatctcttctgtgctgcctgaactactgagaacatatacctggctaaatgtagctcttatgcagtgtggtttctttctttcaaagattgcatccacttcagcttctggctacttttggtcattctttagtgccttcaaataagtgggttttttttttatcagctggaggattgttttgatacaaacttctttgtcttaccaaaatctagatgtcagccgggcacagtggttcatgtctgtaatcccagcactttgggaggctgcgacgggaggatcacttgaggccaggagttccagaccaccctgcccaacatggcaaaaccccatctctactaaaaatacaaaaattagctgggcatggtggcgcccacctgtaattccagctactcaggaggctgaggcacacaagttgctaggacccaggaggtggaggtagatcgcgccactgcactccagcataggtaacagagcaagattctgtctccaaaaataaataaataaatacataaataaatctagatgtccagaccagcagttctcaaactttctagtcttagacatatttaaaatcttaaagttattaagaacttagaagaactttgtgcgcatatgtctgtgtgtatggcattgtaactggcctaagtccagctgctcactgcttagagaccaaaaacatgagaagtgaggaatggtgaaaggaaagcaacttgattgattaaatgccagcagatgggagttggcaaggcttctgcctcaaagaagccatctctaccttttgggctgagtgaagggggttgtgaaggaaaggatgtggaaagggtggtgcaggagggcacaggcctgtgtgtcttgttccgatgcttatcttgagtaattgctcttccggaggtccagtttgcatcattctgactttggcctggtagtggtgggctaactatttgtaacccccactaagtggggaggattctgcagctgggtgtctctgcctggtttgtttcaaaattggcccctggaattcctaagcaagcacataattagataagtaaacactgttcacatggaagtgccaggtgagaaggtgacaaagcgttttaaagtgtctcaacgttgaaagcaagaaaggaaaaaatgttttaaagtatgtttgaggctgggttacttggttacactattcagaaattaaaagagtttttttttttttctttttgagatggagtattgctctgttgcccaggctggagtgcagtggcacgatctcggctcactgcaagctccgcctcccgagttcacaccattctcctgccttagcctcctgagtagctgggactgcaggcacccaccaccatgcccagctaatttttttgtatttttagtagagacagggtttcaccgtgttagccaggatggtctctatctcctgacctcgagatctgcccgccccggcctcccaaagtgctgggattacaggagtgagccactgcgcctggcctgagagagccttcttaaacctatcagaaaaataaaaatcattgtttaatatctatctccctcatagttttcactttcttctctttccctgggcaaagaaagattatttctttgtttcctgcctgagtctcacatcccattctcaccatgagacctaccaccaggttccaaaatccatatgcctgggaccaaaatggtaatttgaagatcacaatttctttccagtaaacttttatgtttcatatcataatgctgagcatcattcttgatatctgccagggatagttgtgggatttgggtgaaaaatactaactcattctcatcctatttccctgagtaccttttcacatcttgtttgcttttatcccctttatgtaccttgtctaggacaataaatatttgttgactaaatgaatcttgtttcattaggcctctcattggtcctttctgatgtgtccttaaagcattttattcactctcagttcttgactttatgaaagtcctgcaagctacaatcatctgatgaattctcaaattgatttccttgttttatgtgaattgctttcaaatagacatttcagcccatttctcccttgtcaactgtagtggtatattttaatctgccaacagaaatatgactatcaattgtcctatcctttttggtttacaatatatcagaaataataattgctatctttactcttatttgtttattcttttgttcccataatctttttttttttaattgagatggagtctcactctattgctcaggctggagtgcaatggcatgatctgggcacactgcaacctccacctcccgagttcaagtgatcctctctcctcagccttccgaatagctgggattacaggcacgtgccaccacgcctggctaatttttgtattttcagtagaggtggggtttcaccatgttggccaggttggtctcgaactcctggtctcaagtgatgtgcccaccttcgcctccgacagtgctgggattacaggcatgaaccaccacgcccggcctgttcccataatcttatttattattgtttgtttctgtattctcttgttcccataatcagcccaagtagtataaaattgagtccatcatctctgttatactttcttaatgatctctccacaatgtgttatattatctcactctgtaaaatatctttacatcttcttatattctgatttgccattgacagcttccaaaatgagagccatatcatttcaggtgtgggctactgtaattaatctttggatttgccatgatttttccctagttttttttttttttttttttttccagttttttctgtcattatgctaaaaagataacactttttaatatgaactttaaatccctctgttttcaagggtgacaggatcatacccgatttggtcattccaaatgtatttctgtctgtgactcagaactttcgataatctctatttgttcaagactactaaatatacttcatatacagtcagccccccgaattcatggcttccacatcagcagattcaaccaactgtaaatagaaaaaaatacacacacacacacacacacacacacaaaatacaaataaaaatcagtatagtataacaactgttggcatagcatttgcactgtattaggtataagtcatgtagagatgattcaaagtatacaggaggatatgtgtaggtcatatgcaaatactacactattttatatgagggacttgagcatctttggattttagtatccttggggatttcggaacctgtccccttagattggataatgagggaaaactgtaattggttttattcatcacagctggacctttccttatatgatggatactatatgttccatatatacttgcaaaattagccaactaggaagttagagggtacagtaatccatccaagactgcctttacttctgatagcagctgttaattcagggatcctcaagactgcccttaggttcgataatttttttttttttttgagagatagtctcactctgtcactcaggctagggtgcagtggcgtgatcttggctcactgcaacgtccgcctcccaggttcaagcgattctcatgcctcagcctcccaagtagctgggattataggcatgtgccactacaccctgctgatttttgtatttgagtggagacggggtttcactatgttggccaggctggtctcaaactcctgacctcaagtgatccacccacctcggcctcccaaagtgctggaattacaggcatgagccaccggtggcacccggccaggtttgataatttgctgaaaagacccatggaactcagtgaaagctgttatactcacagttacagtttgctacaggaaaagattgaaatcaatcaagggaagaaggaaatgggcagagtctgggaaagtgccaaacatgcagcttctagtcgccctatcgccgtggagtcatggatatcaatcctggcaacactatgtgacgatacatacagagtaccaccaaccagcgaagctcagcacagcctcagtgtccaaagtttttattggggctccatcaaataggcctgattgcccatgtggctgagctcagtttccagcgccttaggaagctgagctgatgcttgctgcatgactcaaagcccctaccctaaatcatattgttactgtctggccagccaaagactccccagcaaacaaataaactcctattagccatgacattcaaaggccttaaaaattaccaccctgaaactgaagttaaaggttcggcctctcatttggcagggttaaattctttaccacacaatactatataatatatcatttagctaaaaaatcaagtttcatttcctccatgaaataccttgactactgtatagactatgtctatttctgttttttatgcattccattgtacttgacatctgtaacatgtgagcagacacgtcctctgatatgatctagtaatttggtacctaattcaacattgttttatatgacatttctttctctatttggttataatcattccccaaaataaggtcctctcatttgcctttccttactgcagcttgtaacagaggccatgtatccagtagttatcttattgattgtcgtgccatgcaagcgaaaatgtctttctcatccatttagaaatcatttactactaagttctttttaggggtacctgccagcattttatcccctaacttcagataacagtgtgtaaacgtatactgagaagattttagagaaaatcgtcaataaaatgttgacctccaaaaacatgagttttagttgggaaagcaatactgtattatcaaattgaggactttacatagaatgatcgtgttaaaatcttaggccgttggaaaatatctggaagtgaatgttccagaccataattatattacaatttcagacagacgggatactgaaaggtagaaaaactatgtgaaagcttagccgggagcagtcgctcactcctgtaatctcagcattttgggaggccagggcaggtggatcacttgaggccaggggttcaagacccaccaggccaacacagtgaaaccccatctccgctaaaaaatacaaaaaacatcagtcagatttggtggcacacacctgtagtcccagctactcaggaggtcgaggcatgagaatcacttgaacctgggatactaaggttgcagtgagccgggattgtgccactgcaatccagcctgggtgacagagtgagactctgtctcaaaaaaaaaaaaaggggccgggcgcagtggctcacacctgtaatctcagcactttgggaggccgaggtgggtggattacaaggtcgggagttcgagaccagcctggccaacatagtgaaaccctgtctctactaaaaatacaaaaattagccaagtgtggtggcgggcacctgtaatcccagcttctcatgaggctgaggcaggagaatcacttgaacctgggaggcggaggttgcagtgagctgagaccacgctgttgcactccagcctgagtgacagagtgagactttgtctcaaaaaaaaaaaggaaagactatgtgaaaactttatgaaaaatcggatagtagcatatacttggaggtgtttgaagttcttagggaggcaatgtaactccaattaccaatacagattagttttacgtgttcaaactgcacataagtggaattgtataatatgtattctttttcataaagcttacactctgcaaaatatttgagattcattcttgttgtcattgtgtatcagcattgtttcttcttgttgctgaggtagtattctattgtgtaatacatgacacagttttacctgttcatcttttgatggatatttgggctgttcccagtatggggctattataaataacaatgttaatcataggtaagatgaatccatctttaaattgccctcccaaatatggatggtagtaaggcaacaatagtaagatatacaataattttttttaaatagttaagattaatcagtgctctgcacatacattgaagaatccagtcctttacagctccagtagggaatagcagagttaaggtaggtgatgtattgggaggaaaactcaaacctatctttccctaaagctgaaaagaagtaatttggcaaatttaaggaatgaagttagaattgttggtcaggagaatttcattattgaccatctctggcagaataaattgaataaattgatggtaacagcaatcagaatactacagtttccgggcactgtggctcatgcctataatcccagaacttttggaagatcatttgaggccaggagttcgcgaccagcctgggcaacataggaagatcccgtctgtgaaaaaaaaaaatcaaaaattagctggatatggtggcacacatctgtagccccagatacttgggaggctgaggtgggaggattgcttgaatccaggagatcaaggctgcagtgagccaggatcaaaccactgtattccagcttgggggacagagcgagaccctttctcaaaaaaataaaaatgaatttaaatatatatatatatatatatatatatatatatatatataatgtatacacaacagtgattatattcatgttggaaatatattttgtcttttgctgtattttataattcctcatgggaatatgttttccagattctctgctttcaagagaaaataaattacggttatatggacatctagggcctagactgtagactaatgtttctgtaaacactaggaaatgagctgagaaagttcatttaccattcatgggctaaatgcaagtgaagaagaaagaattggaagcacttataacacatttagtcgtgaggggataaatgtatagcttttcatctcttcctaaataattttttgtcacattgcctactgttcagcacccttggtaggctcacttcagcagctttgaatcttccattccaagtagaatccctctttcttcattctttctcttctgctcacttatcttttttttttttttgggtggggcggggggacagagtttcgctcttgttgcccaggctggagtgcaatggcacaatctcggctcactacaacctctgcctcccaggttcaagcaattctcctgcctcagcctcctgagtagctgggattacaggcatgtaccaccatgcccagctaattttgaatttttagtagagacagggtttcaccatgttggccaggctggtctcaaactcctgacctcaggtgatccgcccgccttggcctcccagagtgttgggattacagccatgagccactgcgcccggccatccttgtgtttcctataccttctcagtgcagcttatatttataacatgccaaagatatgagtgttttttgcttatgccagtttttcttcattttaacagagtagcaagatttgtatttatgtttatacattttccctaccaagaggtaatttattctggcctttttgtagatcacggtagtgagatagtcccaccatagtttgtctgtatgtatacccaatccatagcatttatgtgaagactcacagtgttaatggtattcttttctagaagaagatgggaaaactgaagatgtcttagtgaagttcaaagaataccaagacaggcattctagacccctcatattcatcaaccacaaaaaactaattaaggagagaagtaatatttatggtaaaacatttactctaggcaagaaccgtatttcaaaaacaatactatgtgaatataaacctgatggaaaagttttgaaaaatatttcagaactagtcattagaaatataagccccataaaagagaagtttggtgacagtactggatgggagaaatcactcctcaataccaagcatgagaaaattcatcctgcagtgaatctccataaacaaacagaaagagttctcagtggtaaacaggagcttattcagcatcagaaggttcaagctccagagcaaccatttgaccataatgaatgtgaaaaatccttcctgatgaaaggaatgctatttacacatactagagctcacagaggagaaagaacctttgaatacaataaagatggaattgccttcatagaaaagtcaagcctcagtgtccatccaagtaatcttatggaaaagaagccctctgcctacaacaaatatgggaaattcctctgcagaaagcctgtttttattatgcctcagagacctcaaacagaagagaaaccctttcactgtccttactgtgggaataactttagaaggaagtcatacctcattgaacatcagcgaattcacacaggtgaaaaaccttatgtttgcaatcaatgtggaaaggccttccgtcagaagacagccctcacccttcatgagaaaacacatatagaggggaaaccctttatttgtatcgattgtgggaagtccttccgccagaaggccaccctcactagacatcacaaaacacatacgggggagaaagcctatgaatgtcctcagtgtggaagtgcctttaggaagaagtcatacctcattgatcaccagagaactcacacaggagagaaaccgtatcagtgtaatgagtgtgggaaggcatttatccagaagacaaccctcactgttcatcagagaactcacacaggagagaaaccctatatttgcaatgaatgtgggaagtccttctgccaaaagacaaccctcactctccaccagagaattcacacgggggaaaaaccctatatttgtaatgaatgtgggaagtccttccgccagaaggcaatcctcactgttcatcacagaatacatacaggagaaaaatccaatgggtgtcctcagtgtgggaaagccttcagtaggaaatcaaacctcattcgccatcagaaaactcacacaggcgagaaaccatatgaatgtaaacagtgtgggaagttcttcagttgtaagtcaaacctcattgtccatcagaaaactcacaaggtagaaaccacgggaattcagtaagtaatgtggctttttttgtaaaaaaatgttaagtcatagtaaaccctgtagatgatgttgcttgcaagcgtaatatccaacagtttaaggtactataccacatggtaacctactgtttgccagcctgtaaaacacacacacacacacacacacacacacaaatattattagacaaattagatgacaaaaatcattaagaagtccaaactttttttttattactagcttcagcagacaaaaacttcctctgtcaaggtgttataaacatttaaaatcacattttccatttccatacatatctttttgttcatcagtaataactagttggccaactgactgtggtccatggactacacagtgagtagaggttctttaaaagaaggaggtatgaactgtatttctcattgcaaatacaaaataaaaattagttgttacctcctcacagttgaccatgattctgacttctaacattacaaattagtttttactattataaacctttctataaattggattatatatcatgtattctttcatatacagcttattaccttcatcatgtccgtgagtctaatcattagtacgtgtggcagaagtttatttatttttatccagtatagaattcaattatatgattatatcacaatttatccattctgctgttgatggacttttacattgtttacagcttagggtcataataaatcatgcttctgagaacatacttgtcttggtgtacatacatgtatttctcttgtgtatatacttaggagtggaatcgctgggtcttagagcatgtgtgtattcagtcagatactggcagacaattcagaactttcaccacatgagataattgacactgaagggaaacagctataaattttatcaatatggtgctggttcaaaccagagaattcatgctgcagggaaactcaatcaatgttattgtgaaaactgggaatgtgaatgtaatatatgtagaaaaacatttagccacagcccaaatcttccaggcaaatgtaataaacgtgacattgccgttagccacagtaaatgccttatttgaactcaaaaagtctactagaggagaggcatccagcatttcccttgttcaacatcagagaattccaactagagaaaagtcctgtgactgtgttgaagttagggcgtggggaggaatatagtctttacctatggtctgtatctactggtcaggtacaaatgatgaatatggaaaagcttatagccatcattcatatattatactacaccagggaattcacataggatgagaactcttcaaatgaaatgattgtaagaatgactttaactgttgctcatttcttttacaccatcaaagaattaataccaaagaaaggaagattacaaggaaacaaatgggtcttgggacttttttttttttttttttgagacagaatcttgctctgtcacccaggcgggagtgcagtggcatgatcttggctcactgcagcctctgcctcccaggttccagtgattctcctgcctcagcctcccgggtagctgagattacaggcacacgccacacgcacagctaattttcgtatttttagtagagacagggtttcatcatgttggccaggctggtctcgaactcctgacctcaggtgatctgcctgcctcggcctcccaaagtgctaggattacagggacttttaactctggggaaagctctctttcatgaaagaagtctagccataccgagaccataatgctaggaagtctatgtgtaggccccctggtcaacagctacagctgagctcccagccatcagctagcatcagctgccaaccatgtaagtgaggcctcttggacatccagtcaagccttcagatgactgtggaccctgctaacacccaactggtaccacaaatgagacctcaagcaagaactgcccagctgaggccttcccaaattcctggccaacaaaatcatcaggctttttaactacaaacagttttattttttatttaataaaaaagtttttatttaacttgattgttttattaaaagggaaaagtaattttttagtatctgttaatatataataaaaataaaggtataagcctgggcttggtggctcatttctgtaatcccagcactttgggaggtgttgggaggatcacttgagcccaggagttcgagaccagcctgggaaacatgccaaaaccccatctctacaaaaaattagccaggaatggtggcacatgcctgtagtcccagctactcgggaggctgagtgggaggatcacttgggcccgggaggcggaggttgcagtgagccaggatagcaccactgcactccagcctgggtaacagagcgagaccctgtctcataaataaataaatacataaaggtgtaaatatatggattctagagtcaatgagcaaaggtattgttgttactaataggtgattttggcatgaagaaaaactggccataaaatacagttgaagatttggctgcatttttgccttacgattacataccttaataattacaactcaattgaggggtccatatatattctttctcattttctggcagtaaatcatattcatcatatacttcccaattttgcacacacaaaaaatgaaaatagcccccaaaagaaaggcaggataatgcgatctatcctcaaaagaccccgtgctgtcatttctcaacaaaggcgcagagagaaatcaaggtatggaatctaatgaatgtccgtgaaggaggtacttttgaatgctttaaagaaagtctaaataaagttgcgttttcttttctttttttttttttttgagacagagtttcacttttgtttcccaggctggagtgcaatggcgcaatttcggctcattgcaacctctacctcaagcaattctcctgcctcagcctcccaagtagctgggattacaggcgcccacctgtatttttagtagagacggggtttcatcatgttggccaggctggtctccaaagcctgacctcaggcgatccacccgcctcagcctcccaaagtgctgagattacaggtgtgagccaccgcacccagccgaaattgtgttttctaaagctatttacatataagctgccgctccttaggaaaatttggtcctgtggtttatattttggcatgaaacagcattgggctgtattccagaatcctgcttgaagatttcttttgaagaaatcagaaattttctttgcattttttttatttttttgagacaggttctcagtctgtcacctaggctggagtagagtggtgccattatagctcactgcagacttgaattcctggactcaagcaattctcctgcctcagcctcccaagtagctaggactacaggcaggcgccattcctctcagctaatgtttttattttttatacatatggggtctcgttgtgttgcccaggctggtattgaactcctggcctcaagcaatcttccctcttcggcctcctaaaatgctggggttacaggtgtgagccacttcactcactttagagattttcactttatgaattgataaatacagcattgcatcacttaatagggatacattctgagaaatgcatcatgaggcagtgtcatgatcgtgcaagcatcacagagtgctgatacaaaccgagatggtacagcctactaaacacctaggctatatggtagagcctgttgctcctaggctacaaatctgtactgcatgttactgtgctggatactataggcaattgtaacacaatggtaattatttgtatatgtaaacctatctaaacacagaaaaggtacagtaaaaatgtggtactataatctttttttttttttgagacagagtctcactctgtcgcccaggctggtgtgcagtggtgtgatctcggctcattgcaacctccgcctcctgggttcaagtgattctcctgcctcagcctcatgagtagctgggactacaggtgcacaccaccaaacccggctaatttttgtatttttagtagagacggggtttcaccatgttggccaggatggtctcaatctcctgacctcgtgatccacccgcctcggcctctcaaagtgctgggattacaggtgtgagccaccatgcctggctggtactataatcttatgagaccaccattatatatgcagtccatcatggaccaaaatgtcatgtggtgcatgagtatttttcatctaacttatatattgctcaatgaagtttgggcaactctaaggagcaaacatgtttatagaatctaagtcaacttgacctaaacatatacgacaaaataggagtgattttacaaattcatattttgtagacctaactgcaaggtcataaggcatatgcaaaatgagttcatcagttcagaggactaacaggactccacagagcatacccaggaaatgtttttacttagaagcaaaggatgtggctcagcaaaagaaagggaaggtaagcattagggctcagaatcatctagctgcacattcctcagtggttttattcacacacagaccgcacactgtctctgaactgaagcactaagacctgtatcaaacttgatttggggagagctgacagcagaacttctctacatgggtttttttgttgtcattgttttgttttttgagacagagtcttgctctgtcacccaggctggagtgcaatggtgcaatctcagcccactgcaacctccgcctcccaggttcaagcaagtctcctgccacagcctccctaagtatctgggattacaggcatgtgccaccacaaccagctagtttttgtgtttttagtagagacagggtttctccatgttggccaggctggtctcgaagtcctgacctcaggcaatcctccgcccacctcggtttcccaaagtgctgggattataggcatgagccaccgtgcccagccactgcatgggtatttatgcttctctgttcactggttacatagtcaagccaggctatctaactggttatgtaagtttaaaaaagttaaaaagccatcataaacaaattggctctgggagtctcccagggaatatcagactttaactagtaccttgtatagctcactggccttatcccaaccaagagtcagagccagacatctgggcatcgtggagataattttagagctttgcagtctgactgtaaatcagctccatcttataaacatggttcctataactgctgtgtatttcctgataatgtatgtgaacaagcatatctcctcaccctctgtgtccccagtatcagatagtgcacagtacatctcaaatgtgatcatttcttgtcagctaatgcttgaatttctccactcagtttctggtctagcaatagagccaggcttgccatgtcctgcttcacaagtaatgtgcaacagcaaaagcacaggctccaacactagtctacaacatgcacctgggatgttctagatatttatcagtttataatcaggctttttttttttttttgagacagtgtctcgctctgtcgcccaggctggaggcagtggctcgatcttggctcactgtaagctccgcctcctgggttcacaccattgtcctgcctcagcctcctgagtagctgggactacaggcacctgccaccatgcccagctaattttttgtatttttagtagagacggggttttactgt[138 bp omitted]agtgctgacaagaatgtggaacaactggaactctttcttttttaacttttgttttagattcaggagtacaggtgtggatttgttactggaactttcatacattgctaataggaaaggcaaaatggtaaagccggtctggaaaacaatatgccagtctcaaaaagttacacatccaatatgacccagcaatcccacttataagtacttatcctagagaaatgaaaaattatgtgcacacagaaacctgtacatgagtgtttgtaagtattatttataattaaaaaaaaaactagagacaagcaaatgttcttcagtgtgtaaatggatacactgtggtacattcccaagatggaattctactcaacgataacaataatgagctactgaaacatgcagctacatagatgaacctcaaatgcattacgctaaaggaaagaacccagtcccaaaaagttacatactgtatgattccatttatatgacatgctggaaaaggtgaaaatataacaacagaaaacagatcaaatgttgctgagtgtctggggtggggtggggtctgaatacagaggggttgcacgaggcaattctttgaggtgttggaattgttttgtatcctgcttgtggtcatagataaaaaatctatgcatgtgtaaaaaatagaagtatacatacaaaaaagtgaattgtactgtctgtaatttttttaaataaataaaaatccctagctctgcttcatcagcagcagtacctcctgatttgtgtcttcaaagatatctttagactggcttctgaattacatatccagtagtagtcagcctacacacacacaggccttgccacatggtctcatcattgttccgcaggtcaactcacaacacaagtaacacattacagttagcccgtatttgtaaactccatccagatgatcagccccccattggagtggcaggcttcatgtctgggggtggcacacctatggaagatggaactcagtgtgtgtgctctgttgggcgtctccatcacatctaacagtggctgacaaaccagccaatacatagtcatcagggcatatgcaatcattgggaataatactaagtggggccaattctgctatcccttggttctcagtggtattcttaattccaacacagtgccatttaaaggtccctgattgtatatgtgcagtggcacaatctcggctcactgcagcctccgcctcccaggttcaaccaattcgtcagcctcagcctcccaagtagctgggattacaggcatgtaccaccatacccggctaatttttgtatttttagtagaaatggggtttcaccatgttggccaggctggtcttgaactcctgacctcaagtgatcccacgcctcagcctgccaaagtgctgggattacagtgtatgtttttattgctgcataatgattgtacatatttatgggatatgtgtgatattttgatacatgcatacaatatgtaataaatcagggtaattaggatatccacctcaaacatttatcatttccttgtgttagaaacatttcaaatattctacctattttgaaatatacaataaattattaactatagtcatcctactatcctatcaaacactagaacttattccttctatctaaccatatatatatttttttgagacagtctcgctctgttgtcagactggagtgcagtggtgcgatcttggctcacggcaacatttgcttcctgggtttaagcaattctcctgcttcagcctcctgagtagctgggactacaggcgtgagccaccacgcccagcttatttttgtatttttggtagagatgggatttcaccatgttggccaggatggtctcgactcttgacctcgtcgtgatccacccacctcggcctcccaaagtgctgggattacaggcataagccaccgcactcggccctatctaagcatatttttatatccattaaccaacctctcttcaccactagccactcacttccgaacctctggtaaccatcattctactctgacctccatgagatcaactcttttagctcccacttatgcatgagaacatgccaagtttgtctttctgttcctcgcttatttcccttaacataattaacctccacttccacccatgttgctgcaaatggtaggatttcattctgtttatggctgaatagtattccattgtgtataaatccattatgcattgatggagacttaggttgattccatattttggctgttgttaatagtgctgcagtaaacttgggtgtgcagatacctcttagatatactgatttccttccttttggatatgtacccagtagtgagatttctggattatttggttgatctatgtttagtttcttgaggaaactctataattttttctatagtggttatactaatttacattcccaccagcagtgtactaaagtgttcccctctctctgccctcaccaagatctcttattgtttgtctttttgatagtggtcatttttttatttttattcatttttttgagacaaagtctcgctctgttgcccaggctggagtgcaatggcgtgatctcggctcactgcaacctctgcctcctgggttcaagcgattctcctgcctcagcctcctgagtagctgggattacaggtgcgtgccacgacgccaggccaatttttgtatttttagtagagaggggtttcactatgttggccaggctggtctccaactcctgacctcaggtgatccacctgccccggcctcccaaagtgctgggattacaggcatgggccaccacacccggccttactttttgagacagagtttcgccctttcacccaggctggagtgaaatggcgcgatctcggctcactgcaacctccgccctctgggttcaagtgattttcctgcgtcagcctcctgagtagctgggattataggggcctgccaccacacctggataatttttgtatttttagtagagacggagtttcaccatgttggtgaaatttgcatgagatttagaaggtggaagtgaagcactgccactattcttggaaggttttcatggatgagcaaatggctacatgtggcatgtccttctcatggccagtggcaaaagccaagtcataatatgaaagcacatgtaaagttctgttggggaccagcctcaacaccacctgtagggtacctgaagtccggtggcgacaaaggaatgagaagagacaggttaagagttcataaaggtgggagccaaggggccagagcaaatcaaaagctgcaaaggcgccaagctctggtctccacactatttattgagtacaatcacttagatctaagaagcagatgttcaggggtgaaacagtgaaaggggggcaatggcagtttaggtacattttctttgtgctgaagcagcataaacttaactactgatttattcttttacttatcagagagcagctgtggggagtgggcctaactagaagccagcatatctggccacattccaatgcttcaaaggagtgtctttctccttgagcacagtgtttatagataagagagcaggtcacactctggtcataggaacgtgatggcaattaggaggctttcctcctcagaggcctcttgtggctttccacaacttattgtcccatatttttatggccagtttatgcaggcactccacaagcccttttcccaacagttctaccaaaagtaacttccactcacattctattcgctaaatccaataaattgcatgttagaatgcatgttaacattatctattggttgtgttttgacaattttcttttttttttttctttttgagacagagtctcactgtgttgcccacgctggagtgcagtggcgcgatctcagcttactgcaagatccatctcccaggttcacgccattcttctgcctcagcctcccgagtagctgggactacaggcacccaccaccacgcccagctaatttttgtattttttttttagtagagacggggtttcaccatgttagccaggatggtctcgatctcctgacctcgtgatccgcccgcctcggcctcccaaagtgctgggattacaggcatgagccaccaagcctggccaattttgataattttcatccacatcaaataagaataaatatagcttattggccgggcatagtggctgcgcatgcctgtagtcccagctactcaggaggctgaggcaggagaatttttaacctgggtggcggaggttgcagtgagccaagattgcaccactggactccagcctgggtgtgtctcaaaaaaaaaaaaaatgaagtaggccaaatgtggactaataatgagaatgtgtaataaatcacatattatgaataacctacttttgtccaaagaatttatgaaatttacatgaaatattcccgttagaataaaaggaaactgatagcagttgttgcatctgtggaaagtgagtggctacagaactggatgttaggggagaattaattttcacatttttggtaatttttgaatttttataatgtgtgcttttattaaacaaaaaatttagaagattttaaaaaataaatgtaatgtcaaaatatatacgccagatactctttaatcccactgttgggaatctgcacaatagaaacaaaagaaggtaaaattagagttctaggtgaacattagaaacaacttcaatgtctgtagtaggtaatggcccaaaatacggacatacattccattctagaaatattctgaaccttacaaagaatgggttacatctttacgtactgacctggaaaagtattcatgattattatgaaaaggacaagacgctgtcaaatgtctgtatgggggtaaaagctcctccaaacacatgcaaaaaatgctttctgtgtacaggttgtttgagcataaaggaagaagaaatacacatactggttatctcagagatttgagggaagggaggaaattgttttcattttatttcactgtttcagtgaaatatttcactggtttcagtgaaacatgtaattttagaaaatttattctcaataaaaaaatttattctcaataatggttaatacaataactcagaaacagcattaaaatgagaccaaaatttacactttagttatccactttctcacttaaaaacatttgattttcaaggattatttaaataaataaatactaatgaaactggtggcttaccaactttttccttaaataaaacaaagacaatgtatatttccatcaacaaatttcatgatgctagactaggatggggagggaggagaggaaacctgactggcttctcgccagtatgaagagtctgatgtaagttaagttgtaatctatgattaaacgccttcccgcattgataaggtttctttccagaatgaattctctgatggtgtgagaagcttgaatgatagctaaaggccttcccacattccttacattcatagggtttctcaccagtatgaattctttgatgttgaataaggtgtgaatgaagtctaaaggccttaccacatatcatgcattcatgaggtttctcaccagtatgaattctctgatgtcttttgaggtgtgaacactgtctaaaagtcttcccacattccttacactcatagggtttctcaccagtatgaatcctctgatgtagggttagttgtaagccatcacaaaaagccttcccacattcatgacattcataaggtttcttgccagaatgaattttctgatggtgtgagaagcttgagtgatagctaaaggccttcccacattcccgacattcatagggtttctcaccagtatgaattctctgatgtatagtaagatgtgagcgatgcctaaaagtctttccacattctttacattcataaggtttctctccagtatggagtcgcaggtgttcagtaagttgaaagccacgaataaaagccttcccacattgcttacattcatagggtttttcaccagtatgaagtctctgatgttgagtaagctgtgatcgctgtctaaaggccttcccacattctttacattcataaggtttctcaccagtgtgaattctttgatgtagagtaagttctgagccataattaaaggccttcccacattcgttacattcatagcgtttttcaccattatgaattcttagatgtttaagttgtgagcaatgaacaaaggccttccaacattctttacactcattgcatttgtcaccattttgaattgtctgttgtttaaaaaggcatggtgtattaacaatttctgtgcattctttacattcagaaagttctttagaatgagttcttttgtggtgactaaaaaataaatggtaactgaagatttttctacactttttacattcagagattttctctctatcataaaattcttgagtgagtaaagtatgttggctaaaaatgggcatgttttcatggttaatcataagttgtctaaaataaccctcctcttgtccctgatgttgctcaaaatgacagttgccttcccagatagcgctgaaaattgatctctcaggactatggcttttaaattcttccatgttaacccactgggataattctgtttcataaatatccctttttggagataacttctggggctcatctctggatgccaagtctgaaagataagaaatatattttaactcctggttttgtactataagagaaataaaatatctatggtagcaatgagagataactgcaaataattcatataagaaataaaaggcttggagaactcttaaatgggtaaaggagcacagggaaatgagagcactcaaatgaagtagttaattagggaaataattcaatggtgctgaaattttgatccacctctgaattaccttgagagtttgttgcaattatggatgttcaggaaacattctaaatcaactcaatcagaatctaagagagttggtcttagaatgaggtcaactgagtcagagttcatatgtttaacactatcaggccaaaggtttatgcagcagattgtcagctgttgccaaatatctatttttttccctttttaaaaaatatcaattgaacccatggctttttatttgagaataaagctgccaatataaactctgcatttcccaagctctttcacagctgagaatgccatgcaactgggttctgcctaaagaaatacagaaatattatgtaataccatctgagttctttcgttaagagccaggtggcccacgccctatattgcctgttttccctcttcctcaacaaagctgatggcaatattgatttgctgtcatgtctatcaaataatggttttgcagagtagatacctttctagcttggattttaatgcgagagaaaattaaatttatatgcctgggttatagacattgtatcaaaaaaagaaaattaatttaaacatctatatggtttcaatcgctattgttctgggtctctgtcacaagcagcttaacctacaaatacagcttcccacagaaattttaaaacttcagctcctaggcatgagaatatagggcttctgctaaccaatataatctcattttgagtccaattcctttttattcattaagctataaccaaattaatctgtcaacaattaggacatgccaaagccttttcctatgttagagcttcatagcttcttccatgtgctaagaatctttttgcctagattttttgtatagcgggcttcatttcatctaagtctcagagtaaaagtcacttcctcagaattgtattcctgataatattatctaatgaagtccttcctgaagtactactggaattacatattcatttattaatctttttaatatttggccaggcatggtggcttatacctgtaatcccagaactttgggagacctaggcgggtagatcacttgaggtcaggcattggagaccagcctggccaacatggtgaaacctgtctctactaaaaatacaaaaattagctggacgtggtggcggatgcctgtaatcccagctactcgggaggctgagacaggagaattgcttgaaccgggaggtggaggctgaagtgagccaagatcatgccactgcactccaacctgggcaacagagtaagactgtctcagaaacaaacaaacaaacaacaaaatatatatatatataatatatatatatgtttttttacccataaagctactcaaggatagagaaatcactataaaaacaacctttacaatataataagtattcaataatcagttgctgaatgaatgaattattaaggaaaaggaattaagatgaagagaaacaatacaaagataacaattgacaatcataatcatttaatgcccttaaatttgtaataactactgaacatctctccatgcttctattcactcctacatcgactgcactgattttatatataaacacatacataaataaaccatgtacttgcttatctataacaagccactccaactgagtggcttaaaacagtaagtcatttattattattattactattgctgttgtaattattagtgaagaccaagtcatgctctgtcacccaggcgagagtgagcgcagtggtgcaatcacagctcactgcaggcccgacctcctgagctcaagaaatcctcctacctcactcagcttttggagaagctgagactataggggtgtgccactatgccctgctaatttttaaatcattttttgtagagaaaaggctctcactttgttgcccaggccggtcttgaactcctggtttcaagtgattctcctgcctcagcccctcgaagtgctgagattataggcacgagccaccacaccagacccatttatcattattgtctttcagtcctgaggattaactgagctcagccaggcattccttacttggcatttctctagtgacagtcacacactggtcaggctggatcattccaatggcttcctccacccacatgtcgggtaccaggcctgaggaaatatgtaaagcttgggactgtaacagctgtgatgcctggggctttctatccttatgtggtctctctacatggtgtgtccagcatagctgtttcaaggtaagagatgccctcttacctggcaactccagactccaaaagcatatggggaagtgcaggcagggagggcgggcatatgagcatatgccaggcacaagctgtctacttttatgacctagcctcagaaatcacaaagtatttctatttattggaaacaattcacttagggctgtcccattttcaaagcaggaagttagacttcttttttttttttttttggtttgaggactgtcacagaagcacagaagtggcagacatggtgtgtgtgtgtgtttttggtgggggggggtggggcacagagtcttgctctgtagcccaggctggagtgcaatggtgcgatctcggctcactgcaacctccgcctcctgggttcaagtgattctcctgcctcggcttcccaagtagttgggattacaggtgctcaccacctgtaatttttgtatttttagttgagatttttgtagttttagttgagatggggtttcaccatgctggccaggctggtctcgaactcccgacctcaggccatccacccgccttggcttcccaaagtgctgggattacaggtgtgagccaccgcactcggccagcggacatgtttacaacaaccactacactcatacacatacttatttatgtacagatataaacacaaacacacacttttctacatcacttccttacagacgatgtttttactaagtgaacatacctgtgaaaccaccacttaaccaagaaacagaacattaccagaaaccccaagccttcaaggcccttcccaggtttaccttacccaccaaaggtaggcgatatcctgccttcttacactatgcagtggtttttgtctatttctgaatttccaataaatggaatgatataggaggtacttttttctccagcatcttctgtccagtaccacatgtgaggttcatttgtaatattacaaatagtagtagtttcttaattttcattactatatagcagcagtactcaatgggtggtccaaggaccacagagggtacctgagaccctatcaggaagtctataaggtcaaagctattttcatactaattccgagacatttgccttttttacttattctcttaccactggacaggagagattctgagagactactagaagtgtgataacgtcacattctgaaatctaacagaatgcgtgattatgtatttctgtgtgttctagaagtttctagagtagtaggtttggggaataaacatgtactttcagaaattagctgactttgttaccagtacttctactgtactcttaaaaactgtatttatttatacctgcatttatgtctgtagcctcattattgtccaagaaattattgtgaaatccccaagttttccatgtacctacatggaaacaaaagaataaatacttcattttagaataatattttattatacaataaaaagagaatatctatttctttttctttttagacagagtttcgctcttgttgcccaagctggagtgcaatcacacaatctcagctcactgcaacccccgcctactgggttcaagcgattctcctgcttcagcctcccaagtagctgggattacaggcacgtgccaccatgcctggttaattttttgtatttttagtagaaacggggtttcaccacttagccaggctggtcttgaactcctgacctcaggtgatccgcccacctcggcctcccaaagtgctgggattacaggtgtgagccaccacacccagcagagaatatgtatttcttatacttgaaaatggatattggttttttgttttgttttgagatggagtctcgctctgtcccccgggctggagtgcaatggtgcgatcttggctcactgcaacctccacttcccaggttcaagcgattctcctgcctcagcctcctgaatagctgggattacaggcgtgaaccaccgcatctggctaatttttgtatttttagtagagatggggtttcaccatgttggccaggctggtcttgaactcctgacctcaggtgatcctcccgccttggcctcccaaagtgctgggattacaggcgtaagccaccacgcccagccagttttttgtgtttttttttgttttgttttgtttttgttttttttgagatggagtcttgctctgtcacccaggctggagtacggtggcgcaatctcggctcactgcggcctctgactcccgggttcaagcaattctctgcctcagcctcccaagtagctgggattacaggcacatgccaccacatcggctaattttttttgtatttttagtagagacggggtttcaccacgttggtcaggctggtcttgaactcctggcctcaagtgatttgcccacctcgtcctcccaaagtgctgggattagaggtgtgagccaccgtgcctggccaggtttattttttgagactacttttattattaaaaaatctggcctggagtggtggctcacatctgtaatcccagcactttgggaggctgagatgggaggattacttgagtcctggagtttgagaccagcctggacaacatagtgagaccttgtctctactaaaaaaaaataaaaatagaaatgtagctgggtgtagtggtgtgtacctgtggtcccagctacttgggaggctgaggtgggaagattgcttgagcctgagaggtccaggctgcagtgagctgtgatcactccactgcactccagcatgggtaacagagtgagaccctgtctcaacaacaacaaaaaagatctgttgtataaccctgtgcccacactggacaatactgcattgtacacctaaaattccattaagagggtagatctcatgtaaagtatttacaacacaagaaaattttttaaagtgtttacatatttaataaatacttttttctatttcttagcatacagcaccaatgtaaataaatattaattatagcatccacagttaaatttctcaatatttgtttttgagaaacactgagtattttttgagaaacactttatttcccactttattgagggaaaattgacaattaaaatttatatatttaaaggatacaacctgatgatttgatatacatttacattgtgaaataatcaccacagtcagctaactaacctattcatcaccttacatagttaactgttttcttttttttgtggtaacaaaaaaacatgtaccttcagcacgtttcaaatatacaatacagtactgcaaactagagtcataatattctggagtctgaatgtggatattcagaatccactcatcttgcataactgaagctttattttatttatttttttgagatggagtctagctctgtttcccaagctggaatgcagtggagcgaactcagctaactgcaacctccaccacccgggttcaagcgattttcctgactcagcctcttgagtagctgggactacaggcgtgagccaccatgcccggctaatttttgtatttttagtagaggcagggtttc[142 bp omitted]ttgttgttgttattgttgttgattgagatggagtttcactcttgttgcccaggctggagtgcaatggtgtgatctcagctcactgcaacttccgactcccaggttcaagctattctcctgcctcagcctccccagtagctgggattacaggcgtgtgccaccacgcccggctaattttttgtatttttagtagaaacggagtttcaccatgttacccaggcaggtctcgaactcctgacctcaggtgatccaccctcctctgcctcccaaagtgctaggattagaggtatgagctgccacacctggtcaaaattagactttaggaaagtttgtgtcagcccctgtgagcttgacagcttccaaatacttaaagacttacctgattagattcgtggtgttattaacaagtatgattttttggctattttataagaaaatgtgtcaaagtctggaagatctgcataactaattggagcaatattttccaaataactaatgcatcatgttacaaaacaggtaccacagataagagatccattcaaaaaacaagacagactagtgagttttaatttaatagattaaattcagaggcagatgtgagatccacgtgtcttcttttaatccaagcattaaagaaacgtgcaaaaaatgaaaaacattgccacttttcacaataactattttcgttttgttttggaaaatataacttatttatgttaacatatagtttattatttttaaatgaattaaatgaatatttcatttttcctagatttaatttctaagacagttaatattgaaggatataatctacatatgcaagagctcttggggttctcaatagtttttaagaatataaaggcatcctgagaataaaaagtttgagactgataactatatatagcattgcattctaacacaatttattttcccatatacctaatgatggacattctggttgcttccaatagttgactattatgattagtgctgctatgaacattcctgtacatttcttttggtggaaataattactcttttctgttaggtatgcacatcagagtgaaattgctgcatcataggatataaatttcttcagctgtagttgacattatgcaacaattttctaatttaggccaggtgtggtggttcacgcttgtaatctcagcactttgggaggctgagataggcatatcacttgaggtcagtagtttgagacctgcctggccaacatggttaaaccctgtctctactaaaaatacaaaaattagctgggtgtggtggtgggtgcctgtaatcccagctacttgggaggctgaggcagaagaatcgcttgaacccaggaggtggaggttgcagtgagctgagatgcgccagtgcactccagcctgggtgacagagcaagactctgtctcaaaaaagcaaaaaataaataaataaataacattctaatttaaaattccactttcaatttactttcaattcttttgcgtatatacctagaagtagaattgcttgattatatggcaattctatttttaatgttttgagaaattaccatactgttttccatagtggctgtatgatatagctcggatatgtgtcccctctaaatctcatgtggaattgtaatccccagtgttggaggtggggcctagtgggaagtaactggattatgggagcggttttctcataaatggtttagcaccattcccttggtgctatcctcatgatggtgagtgagttctcatgatatctggtccttgaaagtgtgtgggctgggtgtggtggctcatgcctgtaatcccagcactctgggaggccgaggtggacagattatctgagatcaggagttcaagaccaggttgaccatcatggtgaaactgtgtctctactaaaaatacaaaattagctgggtgtggtggcaggcacctgtaatcccacctactcgggaggctgaggcaggagaatcgcttgaaaccgaggtggaggttgcagtgagctgagattgcaccattgctttccagcctggacaacaagaatgaaactccgtttcaaaaaaaaaaagaaaatgtgtggcacctccccacgccccccactctctctcttgctcctgctttcaccatgtaaagtgcctgctcctgctttgccttccaccatgaataaaagctccctgaggccttcctggaagctgagcagggccatgcttcctataaagcctgcagaaccatgagccaattaaacctcttttcaaattacccagtctcaggtatttacagcaatgcaagaatgatctaataccttgtaccattttacattctcaccaatagtgcacaaaggttcaaatttctccacattcctggcaacacttgttatgttttttttttaaattaaccatcctattgagtgtgaggtgatatctcattgtgtgcttttttgtttgtttgtttttgttttcgtttttggttttgtttttcagactgagtctcgttgtcactcaggctggagtacagtggtgcaatctcagctcactgcaaccttcgcctcccaggttcaagtgattcttgtgcctcagcctcccaagtacctgggactacaggtgcatgccaccatgcctggctaatttttgtattttttggtagagacggggtttcgccatgttggccaggctgatcgcgaactcctaacctcaagtgatccacctgcttcggcctcccaaagtgctgggattacagtcatgagccaccgtgcccagcctcattgtggttgtgactagcatttccttaatggctagtgattttgaacatctcttcatgtgcctgttggccccagcagcacaagaagtatggagcagatcagaatagcagtgtaatggttctgaaaactaaactgtcattggaactaaagcctacaaaagtagatcagatctttactaaatctaacaggataactacttgctcaaattgattaaatagaatcaagactctctgaaacataataacgaaaatatccaaggtacaactgaaaatcacttctcataccaaaaaccaagaaaaccaaaatctgaaggagaaaaggcaatcaactaatgcaaatacaaggatgaagcacatgttggaattatctgacaaagactttaaaacatgcttcacaaaaaggctttgccaatcaattttaaattctcttgaaacagtatattttattatttatttatgtttttttttgagacagagtctcactcttggcgcccaggctggagtgcaatggcataatcttggctcactgcaacctctgcctcccaggttcaagcaattctcctgcctcagcttcctgagtagctgggattataggctgggccattgtgcccagctaattttttgtatttgtagtagagatggggtttcaccatgttggccaggctggtcttgaaatcctgacctcaggtaatccaccctcctcagcctcccaaagtgctgggattacaggtgtgagccactgcgcccggcctgagccaccacgcctggctgaaacagtgtactgtaaacttaaaaacttctaggagagtagatgttaaatgttctcccacacacaaaaaaataagtttataagataactattgtggaagaacaaaaaaagaagcatgtcaggtaacagatatgttaattagctagatttaatcgtttcacaacatatacatatatcaaaacatattgtagaccataaatacatacaatttgtatttttcaattaaaagtatttaaaaaataatctggctgggcgtggtggctcacacctgtaatcccagcactttgggaggccaaggtgggtggatcatgaggtcaggagtttgagaccagcctgaccaacatggtgaaaccccgtccctactaaaaatacaaaaattagccaggcatggtggtgggtacctgtaatcccagctactcaggaggctgaggcaggagaatcacttgaacccagaagacggagggtccagtgagctgagattgctactgcacttcagcctgggtgaaagagtgagactccgtcttaaaacaaaaaaattaaataataataataagaatccatgagtcaaagagggagtctcaaaggaaaaaattttcaaaacaactataagtacatatatacatcctttatatatatgaatatacagaataataacaccacatacaacttcatacttataacttcaacaaattagaagatatggacgaaatctttgaaaatcacaaactaccaatactctactaagataaaataggcaatctgaatagtcctacaactattaaataaattgaatttataattaaaaagctcccaaaaagaaatctctaggttcagacagttgctctggagaagtttactaaacattcatgtgatgttttacacaacgtcttccagaaaacagaagaaaagacaacacttctcaactcactttataaggccagtattactctgataccaaaacaagactagggtgacacaacaaagaaaatacaaatcaattatctttcatgaacttaaatgagaaaattgttaactaaattttagcaaatcaaatccaacccaacaatgaataaaaagcataatataccatgactaagtgggatttattctaggtataagaagctaatttaatatttaaaaacagttcaatgtaatatattatataaatatgataaataagaaaaataacatgatcacatcaatactcattcatattaaaaaaaaaaaaaacctcccagagcattagagaggggaactccctcaaccttataatataaagtatctacaaaattcctagagctggccgggc[134 bp omitted]atggtggcagacgcctgtagtgccagctactagggaggctgaggcaggagaatggtgtgagcctgggaggcggagcttgcagtgagctgagattgcgtcactggactccagcctggggcacaaagcgagactccgtctcaggaaaaaaaaaaaaaaaaaaaaaaaattcctagagctaacatcatacataatgttaaaagactgaatgctttcccttcaaaatggggaaaacacaggatgtccacttttaccacccttattcaacatagtattagaagttcttgccactccaataaggcaagaaaaagaaataaaaggcatagattatgaaataaaaagaaaattatctatttgtcgataatttgtttataagtaggaatctctaagaaaaaaaaactagtactaatatgcaagttgagtaagatcacaaaatataggattaatatataaaattaactacactccaatataaaaatgcaatgccatttacaaatgctccaaagaaaatgaaatacttaggtataaaactaacaaaacttgtacagattctgtatgatgaaaattgtaagatgctaataaaagaaatcaaggaaaacaaaaatatttggagaggcacgctgtgttcatgctttggaagactgaatagaataaaggtgttctctcttacttcatctataggcttaacacaattcccatgaaaatctaagcaaattttttgtagatacagacaagcttttctaaaacttatatggaaagaaaaaggtcctaaggatagccaaaataattatgaaaaacaacacagtgggaagaatcactccttccaatgttaaggtttactgtataactgcagccatcatgaaaggtggcactaaaagagagatggtcacaaagatcaatgcaacagaacagagaatgcagaaagagagccacacaaatttgcacaactaagttttgacaaaggtgaaaaagctattcacttgagaagggataacttttaaataaatgctatgggcatccatagaaaaaaaagaaccttgatctaaatttcacaactttacaaaaattaacacaaaatgaaccacgaacttaaatgaaaaatgtaaaactataaaatttctggccaggcacggtggcacatgcctgtaatcccagcactttgggaggtggaggcaggcagatcgcctgaggtcaggagttcgagaccagcctggccaacatggtgaaaccccgcctctactaaaaaaaaaaaaaatacaaaaattagctgggtgtggtggcacgtgcctgtaattctagctgcttgcaaggctgaggcaggagaatcacttgaacctgggaggtggacgttgcagtgagctgagattgccccattgcactccagcctgggtgacagagcaagactccgtctcaaaaaaaaaaaaaacaaaaactataaaatttctaaaaaagaacattggagaaaatcttaaggacctttgagtaggcaaacagttcttagacgtgacactaaatacacatacacacaccaaaaacacaattcataagagaaaagaagataaactagacctcatcaaaattaaaaacttttgctctgcaaagaccctgttaaaaggataaaaagacaaattacagggcaacccgctggggtccccttccatgctgtggaagctttgttctttcgctcttcacgataaaccttgctaccgctcaaaaaaagacaaattacagactgggagaaaatatttgcaggtcataaatccaacaaaggcattctgtctaagatacaaaaagaactttgaaaactcaacaatataaaactaaccaaattagaaaatgggcaaaaggcatggagagacatttcactaaataggatagacagatggcacacacagatgttcaacattacttgccattaaggaaattcaaaattaaaaccacaataagatataattacccacctattagaatggctacaatgaaaaacaattagaacaccaagtgctgactatgattagagaaactggatcacacatacattgccagttaagaatgtaagacggtacaaacattgttgacaataatttggcagctccttgaaaaactaaaaatggacttattacaccacccagcaactacactcttgagcatttatcataaacaaatgaagacttgttttcatgtacaagtttgtacatgaatgtaaaaaacaaaaacccatatatatgtgtatgtgtatatgaaataaaaggaaaaaagccattttccaaaggacaagtattgcaggattctatttatgtaacatttatgaaattacataattatacagagaacagaacagtggttgccaaggtgtattagtctgctctcatgctgctgataaagacatacccaggactgggtaatttataaagaaaatggtttaatggactcacagttccatgtggctggggaggcctcacaatcatggcagaaggcaaaggaagagcaaaggcacatcttacatgacagcagacaggagagaatgagagccaagcgaaaggggaaaccccttataaaaccatcagatcttgtgacacttattcactaccacgagaacagtatgggggaaagtgcccccatgattcaattatttcccacctggtccctcccacaacacgtgggaattatggcagcctacaattcaagatgagatttgggaagggacacagccaaacaatatcacaagggttaggaaaaagagaaatgggataagtatagctaacacaagggagtcttgtgaggtattgttgagtattttggctattgtggtggtgacacaaggctacatgtgataaaactgcatagagctataaatatacacacagaaatgagtgcatgtataactggtgaaatctgagtaagttctatgaattgcagcaatgtcaattttttggtatggtattgtactatagttgggtaaggtattaaccctgggggaagctgcaaagggggtacacaggactcccctgtacatttctttgcaacctcttgtgaatccataattatttcaaaataaaaagtctttttttaaagaaaattcatgccaaggaaaaggcctacccaggtataaaaaaactggtaaaggaatgttatctttacattaaaatatgtatgagaatatgtaccatttttccatgattcctctctattagtttcctagggctgccattaacaaagtcccacaaactgggtggcttaaaacaacacaaatgtattctctcacagttctgtagcacttgattgattgattgattgagacagggtcttgctctgttacccagactagagtgcaatggcagaatcatggctctctgcagccttgacctcccaggctcaagcaatactcccaactcagccccttgagtagatgggactacaggtagcatgccaccatgctaggctaatttttttttttctttttggtacagacagggtctcactatattgcccagactggtctcaaactcctaggctcaagcaatccttccaccttggccacccaaagtgctgggattacaggcatgagccaccatgttcagcctatagcacttcaatgaatcacagacatcatcaaagaactctagcctgtagaatggatctgcccttggtctatagcaccccaaactttcctggttgatctccttccttctcaatcatccctctgccatctctacctcctcaatatagtcatatattactttctctaactttcctaatttctgatcaacactatttttttgcctagtgattctattagaacatccatccatgtattgttgatcccctgttagattgaaaacgtctctataacactttaaaaatgtattcccatcacctagcaaagcaacttgtatggatcttttatctatttatttagagacagcatcttgcagtgtcacctagactggagtaaagtggtacaatcttggctcactgtagcctcaaactcctgggctcaagtgatctcccacctcagtctgctgaacatctgggactacaggcatgtaccaccatgcctggtgaatattttaatttttaattttttgtaaagacagggcttttgctatgttgcccagactggtcacaaactcctaagctcaagtaatcctcccacctgagcctcccaaagtgctgagattacaggtgtgagccactgagcccagcctgaatcttttaaaaaactaataagcaggctgggcacagtggtgtatgcctgtaatcctagcactttcagaggctgaggtgggaggattgcttaaggaggtcgagaccagcctgggcaatacagtgagacctcatctctgcaaaaaattaaaaaattagccatgcatggtggcatgggcctgtagttccagctactcaggaaacttaggtgagaggattgcttgagccagggaggcagaggttgcagtgagctgagtttgcaccactgtactccatccagcctgagtgacagagtgaaaccctgtctcaaaacaaacaaacaaaaattaataaacactatagattgtgtcctttgatgtacagaagtttttaggtttgatgtagtcccatttgtctgtttttgcttttgttgccagtgcttttggtattatacacaataaatcattgccaaatccaatgtcatgaagcttttctccaatattttctacttagagttttattgctttagctctcacatttaggtctttgatccattctgagttaatttttctatatggtgtaagacaagggtacaactgtattcctttgcctgtggataatccaattttctccatggaagtgttggcacccttgtctaaaataatttgactatttatgcaagggtttatttctgggctttctattctattcctttagaatatctttttttttttttttttttgagacggagtctcgttctgtcgcccaggcgggagtgctgtggcgcgatctccgctcactgcaagctccgccttccgggttcacaccattctcctgcctcagcctcccgagtagctgggactacaggcgcccaccactgcgcccggctaattttttgtatttttagtagagac[140 bp omitted]ctttgtaatatgttttgaaatcaggttttcccaaagtttggtttaaaataaacttgccagcccaacattctgaccagctggcctgctctctgcaagagcttcctgtgcttgctcactcacctgggcaccatcttcctgtctcttccctcacaaccatccagggctccttcccttgctccaatgaggagattacggctggcttagaaacagaaagtcctagttataagaaaagaaattgagatgagatggaaatgaatgtatccaaatacagtgatttagaactgattaaaataaaaataaatcacagataaaaatggtacttgataagggatacagaggaaataaaggagaagagatgaaacactcatattcagatgaacacaggatcataacaaacaaagcaaacaaacaggcgataaaatagtacttaaatttatgtaaggtttctcttttttgctgtgaggaaaaaaaagaagcttcttgagatatttattcttttttttttttttgagatggagttttgctcttgttgtccaggctggagtgcaatggcacaatcttggctgactgcaacctccacttcacgggttcaagtgactctcctgcctcagcctcctaagtagctgggattataggcgcacaccactctgcctggctaatttttgtattttagtagaaacggggtttggcccatattggccaggctggtctcaaactcctggcctcaggtgatccacttgcctcagcgtcccaaagtgctgggattacaggcatgagccacagcacccagcctcctttttttttttaatgttaactgtacaaagttctttaaaaataacttccaaaggcaaatcacttaaaagagagtacaggtcaggcgcggtggctcacacctgtaatcccagcattttgggaggccaagacgggtggatcacttgagatcaggaattcgagaccagcctggccaacatggtgaaaccctgtctctactaaaaatacaaaaattagctgggcgtggtggcgggcacctgtaatcccagctactcaggaggctgaggcaggagaattgcttgaacctgggaggcagaggttgcagtgagccaagatatgccattgcactctagcctgggcaacaaaagtgaaactctgtctcaaaaaaaaattaaaaaggccaggtgcggtggctcatgcctgtaatcccagcactttgggaggccgaagcaggtggatcacctgaggtcgggagtttgagaccagcctgaccaacatggaaaaaacacatctctactaaaaatacaaaactagccaggcgtgttggcacatgcctgtaatcacagctactcgggaggctgaggcaggagaattgcttgaagctgggaggcagaggttgtggtgagccgagatcacgccattgcactctagcctgggcaataagaacgaaactccgtctcaaaaataaataaataaataaaataaaaagtgaaagattacatttattataggaaatggagtggtgctcatttgagaatagtaaatgaacctttattactccagcctatcactctattacccaggaaagaaaaaagcttcactcctggaacccatgtgtctagttttaatcttatgctagtacactagcagatttagcacagtggaagtgaaacaaaagacagagtctgctttctttgacagtgttatgctttaacattgcagatttccaattctgccccttaaacatcaaggaggagttattataagaaaggaccaaaagaacgtgtaaggatggggaaaatgaaaatgtacctccatttagctgtgctggtttctacaatacataaagagaaaattcatccagttatttgaaagctagccctaaattaataggggggaaagcagaaattccaagaagtagattgtgaattgttagcggaattctgaattgtcaggttcttaatttttagataactttaccaagtgacaccaagttgctataattctccaacatcacctccttgtacaaattcctctgcgctgggttcaggcattcccattcctcctgagagacatctatagccacatctctgaacatcaccaactcctaaaatgacaaataatagtactatttttgaaattataagaaatgtttttaaaaagaaaagagaagtgctaaaagaaggtactgcaaggaaggagacagtctactgaatatataggctaagcctgggacatgggtcaaagaggaatttagtgtgactgaagcggagtgcccatatgttcttaaacaattcattttctgcagacacatcttcttgtgtaggtgggaaactcctgttaatcagtcatctcaaaactaagaaaataagtagaggctcccaattaaattaaatagtcaaaaacttttaaatctttccaaaatgtcttattaaaatctctatcttgagaaaaagaacttgaagatttttattcatgattatgactatcatgccataggcatttttagttttcctgcaaattctttagtacacatctggtgcagactatattttccatagatggacactgctgtatcttgcatcccaaatattcttcttcagtgtaaccttgacatcccccttccaattggcgtaaaggtctgtgcccccttctcttgaacctgaaaggacatctgtgacttattcaacctatagaatacggcagaagtgattatgtgacttctgtggttagatcacaaaaacgtctcatacttctgccttactttctggggatgttccttctggaaacccagccaccatgttcctaggaagcctaacaagctctccatgggagagctcatgaggaaaggaaccaagcctccccaaacaacagtcagcaacagcttgcaaaccatgtgagggaactatcttgaaagtgggtcatgtagttcccaatcagaccatttcagctgataccacatggaacagagctgagcgatccctactgagctctgctcagattgtggatttgcaagcccaaccatgattgttgttttaatctactaaattttgggttggtttattatctggaaatagttattgtaactgtaatatgatttttattggtagcataacattggtagcataacatttttaagagacagggtctcactatatttccttggctggtcttgagctcctgggctcaagcaatcctcccaccttggcctcccaaagtgctgggattacaggtatgagacactgcacctagcctcatttaatcttacaacaagagatttaataattctcttaaacttgaatctctggagtgaacaaaatctctacggtattttctaaggtacatattccattgttttgcaatcacacctgagaggtcttaactgttatcatccaccacctctccctgtatatttactgtgttcccaaagaatattaatgtagaatgatccagactctcatagatgtggcccaagtctaacatatgctgttcaatctaaaaccggagtttgtaattggtgatcatatattttctggcaagatctccaatttttccatgcaagcactaatcctatctccatctaattctaaagcctcacacagcaaagtctctctgctcagtgagatcatccaacaccaattcctatcacatctcactggaaaatcccaaattgtgaatttcaaagatttcccacgtgtgatttaattaaccattcattccctgaggacacctcaagtggtggctttttttttctcccacagccttcgtaccactgtcatccttgtttctcattgttggtgtcagacaactgtctttccttctctaaaatcttttttttttttttttttttttaagcagaatatcactgttgcccaagctggagtgcagtggcatgatctcagctcactgcaacctctgcctcctgggttcaagtgattctcatgcctcagcctcccgagtagctgggattacaggtgcacaccaccgcacccggctagtttttgtattttttgtagggatggggtttcac[131 bp omitted]tcagtctataccatgtattatccctctctgttgcagtgatgtgttcacatgcaggtttttgcccctcaggaattttagctcctggctcagtatcactaactctaatactactaatctttattttcagtgatttcaaatgctgaaaacaaaacatcttcaaaacctatgattctatacctagctaaaatcctttaaaatgaaggtgaaatagttgatttttttaaaaaaaaaaagacaaacaaaagctgaaagaatttgtcaccagaacacctatgctacaaaaatgtaaaaggaaattcttcaggtggaaaaaaattgatactagataaaatcttcagtctatatagaagaataaagagtgttagaaatagtaaacataggggtaaatacataagctactcttttcatttaatactttctttaaaagataatcaactaaagaaagaaatatatgctttaagcaaatttagaaataaaatatatgacaataaaaaagatgggaaggggaaatagaagtatccagttgtgtctggcgcagtggctcaccccagtaagccactgcagggaggcaggattgcttaaggccaggagtttgagaccagcctgggtaacaaagcgagatcgcatctctacaaaaaaatttaaaacattagccaggggtggtggcacacaactgtagtcctagttacttggaaggctgaggcaggaggatcacttgagcctaggagttcgaggctgcaataagctatgatgacaccactggaatccagcctgggaaacagagcatgacccagtctctttaaaaaaaaaaaagagtacccaattgtaatatgtttacattatacctgaagtgttctaaaatgacttgaatagtgtaaagcacattgcaaaccttaacccctaaaacagcaaaacaaagagatatagcaaataatcctatagtgacgataaaattaaatactaaaaaaataagattaatccaagacgaggtaggaaaacaggaaaaaaaatttaaaaagaacagatgacaagatggtagagtaaaacctaactatattgctaattacattaaatttaagtggtcaaactacagtatattccctgatttattttatagagccagcattgccttgacactaaaacttaaaaattaattaaaaattaagatgaaataaagtcacttttacataataaaatctgagagaatgtgtcaccaaagacccaaactacaggaaacactaagggaagatcttcaggctaaagagaaatgatacaggatggaaactcagatcacaggaaggaaggaaaagcaactagacattttttcctgttttccaacacatataatttcttatctttgtaaattctttccacatttccaagtatttcttttttatttatttatttttttgaggcggagtttcgctcttttgaggctgtagtgcaatggcacaatctcggctcactgcaacctctgcctcccgggttcaagtgattcttctgcttcagcctcctgagtagttgggattacaagcatgtgccaccacgtctggctaattttgtatttttagtagagacggggtttctctgtgttggtcaggctggtatcgaactcccgacctcaggtgatccgcccgcttcagcctcccaaaatgcagggattacaggcatgagccaccgagcctagctatttccatgtatttctaattcatatattttaactctttttggtaggagcattcaaagctatgatttttccttagggtcctgctttttaatttaatttaatttttttgagatggagtcctgctttgtcgccaggctggagtgcagtggcaggatctcggctcactgcaatatcctccccgccgggttcaagtgattctcctgcctcagcctcccgagtagctgggattacagatgcgcaccacgacacccagctaatttttgtatttttagtagagatggggattc[131 bp omitted]ttcttgtttcaatatgcaatgctatcattgattactaaaaattctttacttttagattatatttcctctttgttcccatacttattaagacataatttataaacttttgataaaattagctttatttctctgattttattattaaattctagttgtatttcactatattcaggcaacattatcatttctaattactggatattactgtggcctcagattttgtcattttttagtgaatgttccacagccacttgaaagaatgaatattaacaattatcaggataccaaatttaatatatatatcaataatatagatctgatacagtatgtgatttagtacttctatttccttattaaattttgtctacttggcctggtttggactgagaagagtgaattaatgtctcttactgctggtaagtgtctatttcttctatctgctctaaattttactttaggaggtaatgctatgatattcaatatatattcagaactgttatatcttcattttgaaatttatactttaaaagtatataatgtctttctgccatgtttaattctgtgatgtggcctgaatcttacttagtctgttttctttattctgtctttttttgtagagacagggtcttgctatgttggcaaggctggtctaactcctgtcctaaagcaattctcccgccttggcctcccaaagtgctgggattatgggcataagctgccatgcccagtcctgttttcttttcattctatttgcctggtatagttgttcgcccatccttttcttaacctttctaaatcagtgaatcactcaggtgtctgggtttttctttgtaattcaatctgaaaggtcttttaatagatgagttaaaccccatttgcatatgttaataaggtatatatgtttgctctctggtcttaactttattatgtaattttttttttttttttttttttagacagagtcttgccttgtcacccaggctggagtgcagtggtgtgatcatagctcactgcagccgcaaactcctgggataaagtgatcctcccacttcagcctcagcctctcgagtagctaggactacaggtgcacacaaccacaagcagctgattaacacaaattttttttgtagaggtggagttttattatgttgcctagactggtctggaactcccagactccagcgattctcccacctcagcctctcaaagtgctagaattactggcgtgagtcaccgtgcctggcttttatcatgtgattattttgttaattctgtcttgctcactctctctgcatatatctgggaagtcttactatacataagttattttctgtctctcactaccagttaagcttcagaagggaagatatgtatgtatgtgatatttttttccccactgatttattccgttacctagaagaatgcctgtcacatagtaggtactcaataaatattcgttaatcacctcatcaaatcaaagttctgacaagagaaacactaatattttcttcaaaacaatattatttgtgttctctccttgtgtctgttaaaagatttcacgtaagggagatgaagaatcatttattcaacaagtatatgaacatgagttggagatgagaggagcaaaaatgaaggccctgaaattctggcaccgtcacttactcactagtaagttattgtataattcccaggtaagaaactatgtcagaataaataatgcaggccaggcgcaggggctcatgcctgtaatcccagcacttcgggaagctcagatgggcagatcacttgaggccaggagtttgagaccagcctggccaacttggcaaaaccccgtatctacttagagtacaaaaattagctgggtgtggtggcacgtgcctgttgtcccagctacttgggaggctgaagtgggagaatcgcctgaacctgggaggtggaggctgcagtgagccaagttcgcaccactgcactctaaccttcccacctgggagacagcgaggctatgtctcaaaaaaaaaaaaagcaaatagtcacatgccctatacaaaaaaaacaaaaacaaacaaacaaaaaatcaagtattgtaattaggagcaagaaaaaaccaacttacatgggccatgtcttattttagaattgaatgtattatttaatcctcttcttcgttccctctggaagaaactcaatccaaagaaggtgttgctgggagagaggggagttaaaaaaaagacaggagattattgcctctaagctcccaaaatgttaattcagaatgacatttttcttcccccttcatatctcctattcccagacctgatacatacatacataaattattagtgggaatttggacaaatcctagctttactcaaaaccatgaggaaactcagctacagcaggatagactcaagaaaagcaaggatcatgcccttcagcagaagggatagttaggccagcccattgtcccaatactatgatgaaatcgaagccaggatcagggtgctgagaactgcactgggtagattttcactgaattaagaggaaaaagaaaaggtaatgaacattatgagaaaagattagggaaacagaaaacagacccaaaagacccagtgtatgtgtaacagaaatttcaaaaatagaggctgaaacaacacagatggaagagaaaaaataaatagaacaaaaatttgcagaccaaaataaattcttgagtctttagtttgaagtacagtgctgtaagaattaaagaagaatcatacctggaaacatcctgaaaaatattcttaagtttgtctttgaatacagacaaaaggacataaatatcttttagtaagaagttgcagaggccgggcgcggtggctcacgcctgtaatcccaacactttgggaggcagatgcgggcggatcacgaggtcaggggctcaagaccagcctggccaacatggtgaaatcccgtctctactaaaaatacaaaaattagctgggtgtggtggcggatgcctgtaatcccagctactcgtgaggctgaggcaggagaactgcttaaaacccgaaggcggaggttgcagtgagccgagatcgcgccaccgcactccagccacggtgaaagagagaaacttcgtctcaaaaaaaaaaaaaaaaaaaggaagttgcagaacaatgtgtattgtggccaaatctcagaaaaaaaaaatcaaacacataggtacataagcatactacatatgtggtgtttttctgaggctgtaatgataaatgcggggtagcaatgtgattttcgcttgtgttgtgtgtgtaaatctacagctaactcctcaagtagtcaggaaaggatgagagatggatgaatgacagatctctggagtggggcgtcctgagccttagatgtgtgcacaggagcggggtgaggtgaatgtgcgtgtgtctgtgtgtgagagaccagagttgactgagaggagtggaagctctctgcctgatcgtgtgagcctgaggataacgtgaatgtttttttgtttttttttttttgagacagtttcgtttcactcttgttgcccaggttggagtgcaatggcgcgatctcggctcacagcaacctccgcctcccgggttcaagcgattctcctgcctcagcctcccaaggagctggaattacagacatgcaccaccatacccggctaattttgtatttttagtagaggtggggtttctccacgttggccaggctggtatcgaactcccgacatcagggcatccacccgcttcgggctcccaaaatgctgggattacaggggtgagccaccgctcccggcctgtaaatgtgctttttctttcacgtaaataaatgagatttacacaaatagccattcacaatcatggtcacagtcacctacaaaccccatttacacaaatgatcaggcacacaatcacactgtcactaaagcacacccacgcaccaggtcgctgtcccaacagtaacacacagcccaaagagaaaccctacttcctcacgcattcaaaacacacccacctaagggctgatcccgcactcagaggcctaaaactatagacattcccttccgcggcactggtgagccaggatttcttaccttcagcattctcagggaaggctctggtccaagctctgattcggattccaagcgaagccacacgcccagctcttccttctccaccggcccgggacatccttacctgcctctacccggagaccattcctgcgaggctcctaccggaagtagctgtggacagcagtgtcctctgggaaatgcagtccgaggggagagcgcctggggtggagcgggtgtgttccgccgggctccgggatgcacttgcgcagtttcacccgaggctggagtgacgccaacctgttaatgttcgttttcggattctggacttcgggttccgctgaggacggatttcggaataggcacagtggctgccccgaacccctcaaggcggcctccgcgggctgtggctgaagataattttcggcgggcgcggactaacccggcttccctttgtggagttgtggtgagaaaggtgttttgttgtgcgcgtgtccgaaggtgactccggaggagaaggtggatatgaactgacggtgagggtgtagcgcgtgagatttgtatgtgaaacgatttaaaaaaaaattttttttttggccgggcgcggtggctcacgccaaggcgggcggatcaccgagaccagcctgaccaacatggagaaaccccgtctctactaaaaatacaaaattagccgggcgtgatggcgcatgcctgtaatcccagctactcgggaggctgaggcaggagaatcgcttgaacccgggaggcagaggttgcggtgagccgaggtcgcgccattgcactccagcctgggcgacagagcaactccttctcaaacaaacaaacaaaactgtatgtcatatatttgactccatttatttatttatttagagacagagtcttcttgccctgttgcccgggcaagaaaaaacaaacaacaacaacaacaaaaaactgtacgtcatatatttcactcaactttttttttttctttttttttttttgagacggagtctcgctgtcgcccaggctggagtgcagtggcgcaatctcggctcactgcaagctccgcctcccgggttcacgccattctcctgcctcagcctcccgagtagctgggactacaggcgcccgccacctcgcccggctaattttttgtatttttagtagagacggggtttcatcgtgttagccaggatggtctcgatctcctgacctcgtgattcgcccgcctcggcctcccaaagtgctggattacaggcgtgagccaccgcgcccggcctctttttgagacagggtcttcatgccctgttgcccaggctgactgcggtggcgcgatcctagctcactgcagtctccacctcctcagctcctcccgcatccacctcccaaagtgctgggatagcaggcgtgagccaccgggtcaggccaaaacgatttattttatttttatttttttggtaaagacagggtctcgctatgttgcccaggctggtggtctcgaactcctgggctcaagcgatcctcccgtctcagtggccaaagtattggatgacaggtgtgagccaccgcgctgggtggtgaaacggttttgaggctttttgagaatggctgttctatatgcccgcgtggggctcatgcggcgagcgccgccactcccgcagtggcccctgtgggggtgatacgtgatgtggcttaaatgtgagaggccacctggacccgtgtgattgccacgtttgcaggagcgcagccacgtgcacagggatcttgtgacattctgtgtgaggctttttgcgctgggtccacccatgattagaggactagtgtgactgtggcggcccctgagaagggaagaagctggttgcgaccaggaaggtctgagatggatgaatgacagatctctggaccagggcgtcctgaaccttagatgtatgcataggagcggtgtgaggtgactgtgtatgtttgtgtgtgagagtccagagccgacttagaggagtggaagctggcacatgttatctgccagaagggacagatccatggtaaggatttttaaccttgctgagagaccagtaactccatcaccaagtgtaatatgaggaaatggtgcttgtttgagaacaagtgattctgcttgtgtctgattctcattcatgtatgtgagatggtttgcacttgaaactgtcagtgagagagaaagtagagtgaaatatatgacgtacagctggccctccctatccatgggtcttgcattgtggattcaacaaaccttcagttgaaaatatctgggaaaagaagttgatgtttgcatctgtactgaacttgtacaggctttttttcttgtcattatgccctaaaaaatagaatataacaactatgtacatagtatttacatggttattaggtgttataagtaatctagagagggtttaaagaatatgggaggatttccatagattatatgcaaataccgtgttcattttatataagggacttgagcatctgtgtatgttggtggggaggggtcctggagggacactgagggatgactatgtgaaagtggtttgcgaatatgctcaagtctctggatgaattgtatgacagtgaaggggtatgtgattagactgttgtggctttgaggttgatgtgtatgttttaaaggattatgattgagttggagatcatgtgagatttggtgtgtttaaatgtgacatgaattaaaatccgaatgaaagattgcgaagttatatgaatgtagtaactacataagagaatgcaggtatctgggacccatggatacgttacagtggggaaaataaataatcagacctttcagggattacttttcagggtagtttggtggcagcactttgtataaggaaggcaaatccatatccatagtgtctatttcagtgagaaaaaagcagtccgatgtaaccaacctgccaccagagaatggtgtcatgttgggactcagtgttggtctctgcacagtcactctaataaaagccgtaggtcccttttggaagactgggagaaagattaacagtataaatttctggaagtatactggtgctcttccttaaggggacctggcctcccctttgttcaagggcttctgggtctcttcactggctcaagtctgggtattcattgagggacactgactttctgtctttatgaatcaagttatacttttgttcacttgacctagaagtcttccacttacacaaatcaattaactctttagtagatttcctatctatttaacttccatcaaagaatatcagccatcttcccagacagttaccctgtaacagatattttctttgaaatgttctttcatggccattttgcattctttatcacaataaattattgtttcatttttattaaattgttttaaattagacactggctctgaactgacctcaattccaggagatccaaaacatcactgtgatctaccagtcagagtaggggcttatggcagttaggtgatgaatggagttttagctcaggtctgtctcacaatgggcacagcaagtcccagaagcattctgtggttgtatccccaataccatacacataattggactaaatctacttagtaaccggcagaatccccacattgattacctgacctgtggactgagggctgttatggtgggagaggccaggtggaagcgactaaaactgtctccacctagaaaaatagtaattttttttactatttttgtaaatagtaaaaatttactatttacaaaataatagtaatggattcccaccccatcaccattcaacttgcctatttggccctgcagaagacaaatgggtcttgaagaatgacactggattatcataagcttaaccaggtggtgactccagttgtagctgctgtaccaaatgtggttttgttgcttaaggatattaacacatcctctgctacctgatgtgtagctactgaattggcaaatgcttttttctccatccttgttatttaaaaccaccataaatagcttgctttcaattggtaaggccagtaatacgctttcactgtgctgcctcaggagtatatcagctctccagacacatatcgtaagttagttcacagggatctcgattgccttttccttccacgagatactgcactgggccgggcgtggtggctcacacctgtaatcccagcactttgggaggccaaggcatgtggatcatctgaggtcagcagttccagaccagcctggccaacatggcaaaaccccgtctctactaaaaatacaaaaattagctgaacatggtggcatgcacctgtaatcccagctactcgggaggctgaggcaggagaattgcttgaacccaggaggcagaggttgcagtgagctgagatcgcaccactgcactccagcctgggcgacagagcaagactccgtctcaaaacaaacaaacaaacaaataaacaaaagatactgcactgatccattacattgatgacattacactgattcaacctagtgaacaagaagtagcaagtactctagatttattgttaagacattgcatgtcagaggatggaaataaacccaacaagaaatcaggggccttctacctcactgaaattcccagaggtcgggtggtgtggagcatggtgagatatcccttctaagatgaagtataaattgttccatctggctcctcctacagtcaaaaaggaggcacaatgcaaagggggtctcttcggattttggaagcaacgcattcctcacttggatgtgttattctgctggccatttaccaagtgatccaaaaaactgttagtttacagcggggcccagaacaaaggaaaactccccaacaggaccaggctgctgtgcaagctgatgtgccacttgggccacatgatccaacaaatctaatggtgcctcaagtgtcagtagcagagagggatgccgtttggagcctttggcagggcccagcagaggaatcacagtgcaggccctgaggattttggagcaaagccctatcttcctttttagaaaacgactcttcagaggcagcttttggcctcctactggaccttagtagagactgaacatttaatcatgggccacgaagttaccatgcaacctgcactacccatcaggaaatgggtgttacctgacccaccaagtcattaaattgagtgtacacagcagtactccatcataaaatttaagtggtataaatgtgatcaggcctaagcaggccctgaaggcacacatgtgaagaagtggcccaaaagcccatcgtcccccctcttgctacaatacctttctctcccagcctgcactcgtggcctcatggggagttccctatgatcagttgatagaggtagagaagactcaggcctggtttacagatggttctgcatgatagacagataccacctggacagcgctacagtcctgttctgggacatccccaaagaacagtggtgaagggaaatcctcccagtgattggaactctgagcaccgcacctggttgttcatttttcctagaaggagaaatagccagatgtgacattatataccaactcatgcactgtagccaatggtctggctggatggtcaggaacttggaaggaacattatttaaaaactggtgacaaggaattctagggaagagatatggacctcgctgaacaggtaaaaaatataaagatatttgtgccctatgtgaatacttaccaaagggtaaccttagcagaggatgtttcataatcgggtgtataggatgacccattctgtggatatcagtcagcctctttaccaagctacccttatcatcacccaattggctcatgaacaaagtggtcatgatggcagtgatgaaagttatgcatgggctcagcaacatggacttctgctcaccaaagccaaactggctacagctactgctgagtgcccagtctgctggcagccaagaccaacattggctccccaatatggcaccattccctggtggcaggctgatacattggattgcttccatcatggaaggggtagtatttttttcttactggaatacacactttagatacaaatttgccttcctgacacaaaatgcttctgccaaaactaccatccagacccttaacgaatgaaggtttgggtcaccccaccagttaaagaaccacaatcagctgaggagctcgcttgctgagggaaaaaggaatacataatggataatggaagaaggtaggtatgaataccagctataaccacgtgagcagttacagaaacaaagactaattgtcatgaatgtgtcttctttattttataatgaatgtgtatacaacacagctttgttttcatccctttcatatctctttatcatgtacagtatgatatactgactttatattagagtatttaaatattgttaactttatatcagtttttaagttatgggatatcagggagaagcattaacatcatccagactttgcatcctcttctggggaagtgttagttatttttggttttatgcaggatagttgtatcatgttaagcagaagtataaccttgttactgcctttattcagatatgaagtatggttttaggagatgcttatgggtaccaagtcgacaagggtggacttatgatggttaattttatgtgtcaacttgactgggccatgatgcccagatatttggtcaaacattattctggatgtttctgtgaaaggtgtttttttggatgagagtaacacttaaatcagtggactctgaataaagcagattacgctccacacaatggatgagcctcattcaatcagctaaagttcttaatagtacaaaggctaatgtctgagcaagagggaattgtgttagcagactgcctttagacttcgaatcacaactgttttctgggtcttcagcctgctggcctgccttgcagattttggacgtaccaaggctccacaattgcatgagccagttccttaaaataaatctttctgtgtgcatgcatacacacagacacagacacagacacacacacacacacacaccctgtttgttctgtttctctagagaaccttaatatactatcctaagtattttacatgtatagtgtcatttaactcccctcagaaccctgagggagttattgatacctttcccggtaaactgatgatgcaggtgaggcatcaagagcttaaataacttgtaaaatgtcacagagttcctaagagaaggaactggaatttgaatttcaaagtcctcagtctttaactattagattaccattttctaacttgacaccttctattctatatcccacccgcttcacaaagccattcctgatgagtgccaactaatttggaatgaaaatcattaggattatgggttctattatatgatatttaacacactgtttattctcaaacatttttatttactaattattatcaggaattcttcaatggcattcttgtaatactatttagttcatttttataattacttcctaagagacaaattgtcctagaagtggggggtttctgagtaagacactggcatgcctggcaacatgcaagaccttgtgcttcaatacttggaagaagcacaaattactaagatataattgctgcttttgtattgcttataattcaacaggggaaataaaagtaagtcaaaggtagagcatgacaaagacttctagagaagtacaggtgataaccctgggagttcccaagaattcataggagctctgggtgtgaatgaatgtcctctcgtcatgtgtatgccttacagattagagtctgttgatgttgggtctaaagggtactaatggagcaaggctgtcctcttactgatagcagggcattatggctaatatttcggaagtgaaataaatccttctgtcaagaaggcatagaaaacaaagcagcaagtccaaggtaaggtttaaacctcctagctcttcttccctgggcagaatacccacagtcatagttgggtccaaattaatattttttttaacataagagaaataattcatcacatagtatttagaatatgcttagctgtaaatctaaagacttcttaaagcttttttttttggagacagagtctcactctgttgcccaggctggagtgcagtggcatgatctctgctcactgcaacttcttcctcctgggctcaagcgattctcgtgccccagccacccaagtaactgggattacaggcatgcaccaacatgcctggctaatttttgtatttttagtagagatgggtttcaccatgttggccaggctagtctcaaactcctggcctcaagtgatcagtccacctcagcctcccaaagtggagggattataggcgtgagccactgcagccggcctaaaagcttttttaatctactttttgaaaatcttccatttaataaaatgccttaaacatacattctaaaatcaacagatgtttcttgcaaagaaaatagcaagtatatgtaacaagtatacttaagtttaaatttataaaagtatatttaaaacaaaaaatcagtatcacagcctattaaatgttaaatgttaaaggtataccttggctgggtgtggtggctcacacatgtaataccagtactttgggaggctgaagcaggaggattgcttgagcccaaggagttggagaccactctgggaaacagaatgtgaccccatctctacaaaaaataaaaaattggccaggcgcagtggctcacgcttgtaatcccagcactttgggaggctgaggcagacagatcacaaggtcaggagttcaaaaccagcctgatcaacatcgtgaaaccctgtctctactaaaaatacaaaaattagctgggcgtggtggcgtgcacctgtaatcccagctactcaggaggctgaggcaggagaatcacttgaacccgggaggcggaggttgcagtgagccgagattgcaccacttcactccagcctgggtgacagagcgagactccgtctcaaaaaaataataaaaaataataataaattagccaggtgtggtggcatgtgcctgtggtcccagctacacaggaggctgaggcaggaggatcagttgagcccagcaggtcaaggctgcagtgagccatgttcacgctgctgcactccagactgggtgacagagcaagactctgtctcaaacaaaaacaaaaacacccagtatacctctatagatatttttatttctattgctgatgtctggcattctatttgtatgtatatgtacatgtatctgtatgtacatatgtacactttgataaatggcatagctgtacatataataacctactgtagccactgtcagcatgttttggatttgtctatatttttctattattctacacctttttttttttttttttttttttttttttgagacagagtctcactctgttgcccagggtggagtgcagtggcaccatcttggctcactgcaacctctgcctcctgggtcaagcgattatcctgcctcagcctcccgagtagctgggattacaggcacctgccaccatgcctggctaatttttgtatttttagttgagacggggtttcaccatattggccaggctggtctcgaacctctgacctcaagtgatctgcccgcctcaacctcccgaagtgctgggattacaggtgtgagccactgcacccaaccaacttttttttttttttaactgatcacttaacagttcgttctgaggaagttctggaatttttaaactagtatattcctgctagactcaaagctgaaccatgccagagaaattccttccatatgctgcccagctgctatgtataccccaccctcccatttccctcagggtcctgtgggacttactttcagtggcaaaaagcgtaattacttttgcaccaacctaatagatttggagtgtttttgtcatttgcaggactgtcacttcgagggataaccatcaagttctccaggtgcagagtgagtggctgaaccctgcttaaagggatgtaactataaggatgtgatgtcagagcctagtcttgctagttaagaataatttcggtggctcgcgcttgtaatcccagcactttggaaggccaaggttgggggatcgcttgagcccaggagctcgataccagcctgggcaacatggtgaaacttcatctctatttataaaagtaaaagatagggccgggcgcggtggctcatgcctgtaatcccagcactttgggaggccgaggtgggcagatcacctgaggtcagaagttcgagactagcctgaccaacatggagaaaccctgtctctactaaaaatacaaaattagctgggtatgatggtgcatgcctgtaatcccagctacttgggaggctgaggcaggagaatcgcatgaacctgggaggcagaggttgtggtgagccaagaccatgccattgcactctagcctgggcaaca[141 bp omitted]gaaaccctgtctctactaaaaatacaaaaaattagcccagtgttgaggcgggcacctgtaatcccagctactcgggaggctgaggcaggagaattgcttgaacttgggaggcagaggttgcagtgagctgagatcatgccactgcattccagcctgggcaacagtgcgagactctgtctcaaaaaaaaaaaaaaaaaaaaaaaaaaggccaggcatggtggttcatgcctttaatcccagcactttgggaggccgaggcgggtggatcacctgaggtgaggagttcgagaccagcatggccaacatgtcgaaaccccatctctactaaaaatacaaaagttagccaggcatggtggtgcgcgcctgtagtcccagctacttgggaggctgaggcagaagaatcgcttgaacccaggaggtggagtttgcagtgagctgagatcatgccactgcactccaatctgggcaacagagtgagactccaactcaaaaaaataaataaaataaaaatttttaaagaatattttcctttattatttataatctgcttgctgggagtattttctttcattgtgagtctcttgagagccttggaagaactgatctgacatttttatagctgcaaacactcaactgtgtttttattattgaggcttcattttcttgacacctaaagtgactttatcttcctctgtctcatattttcctctccctgaattgacatcaccacaacaggcctaagtccaatttcttttcctatatacaggaccttttatctctaagccagatgtgatttccccattgaagaaaaggagatagccgtgaatgtgtggagagtaatgtgttaaggtggctcaaagaagagggaagccattgcagataaatgctcagctgatatgaagagtcaaaacttcaaggtattgtttgagaaacttttccctcagtggccagtggagagaactgaggtcccttcagtctgagttcccaaagacacctcaccatcatgcctctgtgtcagtgtgcccatagctccttctataattcttccagttttaaggagggaaggattagccttatagagtttctaattataaaagaaatacacactgagcattaaaattaagaaaacagagaatcctattccacatagcaaaggaaacaataggatgaagagacaacccaaagattaggagaaaatacttgcaaatcatatattggataaggggctaatattcaaaatgtaaaaggaactcacacttcttaataacaagaatacaaataactggccgggtgcggtggctcacgcctgtaatctcagcactctgggaggccaaggtgggtggatcatgaggtcaggagattgagaccatccttggggttaggtgaaaccccatctctactaaaaaatacaaaaaattcgccaggcgtagtggtgggtgcctgtagtcccagctactcaggaggctgaggcaggagaatggtgtgaacctgggaggcggagcttgcagtgagccgagatcgcccactgcactccagcactccagcctaggtgacagagtgagactctgtctcaaaaaaaaaaaaagaatacaaataaccctattaaaaatgggcaaaggacttgtatacatttctcaaaagaagacatacaaatggccagcacatatacgaaaaatgctaaac[140 bp omitted]tggtgaaaccccgtctctaataaaaatacaaaaaattaaccaggcatggtggtacgcacctgtcgtcccagatacttgggaggctgaggcaggagaatcgcttgaacccaggaggtggagattgcagtgagccgagattgcatcactgcactccagcctgggcgacagcgcgagactccatcccccccaaaaaaaccacagtgagatattaccgtgcacctgttagacacctgctattacaaacaaagatgaaaggttagtgttggtgaggatgtagagaaaaggaacactgttgcgagcactgtaaattactacagccattttgggaaacagtgtagagcttcctcaaaaaacaaaaaatagaattaccatatgagccagcaaccccacaaggaattgacatcagtatgtcaaagatgtctgcactcccatgttaactgtagcattattcacaataactaagatatggaaacaagctaagtgtccatcaatggatgaatggattttttaaatggaggatatatacacagtggaatactattcagccttaaacatgaaattctgtcatttgcaacaacatgggtatacctagaggatattatgttaagtgaaataagccagacacagagagacaaatactgtatgatctcacttacatgtggaatctaaaaagttgaactcttagaagtagagagtaggagggtggttaccaaaggttggggggtggggatgtggtggatggggaaaggggaaatgctggttaacaggtacaaagttttgtttagataggaagaatacattctgctgttcttttgtccaacacagtgactatagttactgtattgtatatttcaaaatagctaaaagataggattttatatgttcttaccacaaagaaatggtaaatatttgaggtaacggatatgctaaccagcctgatttgatcattccatcatgtattgatgcatacaaatatcacattgtaccatataaattatacaattattgtacaaatatatacatcaatatacaattgtacatacaatacatacaattgttgtacaaatatatacaattattacttgtcaattaaaaattttaaaaaagaaatctgaaataacagttgccccctatgagcatctcacgataaatccctttaatctcctctacatatactgagtattaaaaaacagaatcgtctagaacattgttgctgttctgagacctgtctttctcatttaacacaagtgaacatttttctttgtcagcaagtagcggtaaacatcatccattctaatggctgtattttttaataggtggagttgtatcttcagggcagattcctaacagtggaatggctgggtcacaagggaaatgtgtaggtagtttttgtacatgttgtcaaatttcccaccataagggttgtgccggtttgttttcccaccatcagtgtatgagactgcctgattccctgtacattcattcctgtggctgctctaacaagttaccacaaacttggtagctttaaacaatagtttactctctcacattctggaggccagaactccaaaaatctagacatcagcagggctggagcgctcctagagattctaggggagaagcctcactttgcctctttttctggtggctgtagccattccttgaccattccttgacattcctggccccatcactgagatttccacctccggggtcacattgctgcctcttcttcctctgtctgccagtctccttgtgtctcttttaaggttgcttgtcactggatttaggacccaacccacccagacaatccaggatgaactactcatctcaaacttcttaatttaatttcatctgcaaagaccctctttccaaattaagtaacattcacagtttccagagattaggacatggacatatctttttgcagggtcatcagtcagccgactatatcctgtctcaccaacagaatacattgttatattttttaatttttgtcatcttgataggttaaaaatggtctcagtattccccctctccccctgccaagagacagggtcttgcttgttgtccaggctagagtgcagtggtgcaatcatagctcactgtaatctcaacctcctggcctcaagcaatccttccacctcaggctcccaaagcactgggattacaggtgtaagccacctcacctggcctgtctccatattattttaatttgtatttctctttttacacatttaagggtcccttttacatattttttgtgaattgttaatttctcttacccatcttttctgtcaggtttttgggtctttcccttgacattaagaggagttttgtttctttgagacaaggtctcacgctgatgcccaggctggagtgcagtggtgcaatcacggctcactacagccttgacttccagggctcaagtgattctcccacctcagcctcccaagtatctgggactacaggcacacaaccacacccagctaattttttgtatttttttgtagaaatggagtttcaccatgttgcccagcctggtcttgaactcctgggctcaagcgattggcccaccttgtcctcccaaagtgctgagattacaaggtgtgagccactgcacctggccaagttttcttttttttttttttaattgggaattgttatagactgatttgttcccccccagttcatatgtttaatattattaactatagtcatcatgttacacaacagaacaccaaaacttattcctctcatataactgaaactttgtatatactgatcaacctaactcctaatttctagtagtataagacttaagacatacaaccagatatatgtagagagagtgaacaagagggaagtaacaaaataattacatgataaagggtgggtgctatggctcacacttgtcatcccagcactttcagaggctgagagacagggggatcacttgaggccaggaattcaagatcagcccggggaacatagtgagaccccatctctataaattttttaaattgtctgggtgtggtggtggtatgcacctgtagtcctagctacttggggagctgaggctgaggtgggaggattgtttgagtctaggagtttgaggtggcagtgagctatgatagtgtcactgtcactctagcctggagtacagaatgagaccctgtctcaaaaaaaaaaaaaaaaaaaggttaaattacaagctactactatgtacagcaacatggatataatgttatctatatgtatctatatacttagaaataatgttgagcaaaggaggtcagacacaagagtacatactatatgattccacctatatgaagttcaaaaccaaaccaaactattctattatagaggtcaaactaatggttaactttgaggtataatgattgggaagagatatgagggagccttctgggatgttggaaagtttctatgtctgtaatggcggttgcatgggttttttttttattattttattattattattattattattttttttttttgagacggagtctcactctgccgcccaagctggggagcagcggcaccatcttggctcactgcaagctccacctcccaggttcacgccattctcctccctcagcctcccgagtagctgggactacaggtgccctccaccacgcccagctaattttttgtatttttagtagagacagggtttca[140 bp omitted]aatttgtgcttcctctctctctctttgtgtgtgtgtgtgtctgtgtgtgtgtgatttcatgtgttcatttcttttactcactttttctatcgggtttttgggtctttccctcgattttaagagttttttgtttttgtttttttgaggcatggtctcactccaacgctcaggttggagtgcattggcacaatcacggctcactacagcctcaatatccttgggctcaggtgatcctcccatctcagcctcccaagtagctaggactacaggtgcaccaccacacccagctaattttttgtatttttagtagatacggggtttcaccatattgcccaggctggtctcaaactcctgggctcaagtgttccacccgtctcagcctccgaaagtgctgggattacaggggtgagctatacaccctcaaaataaatggcatatctgcatttttaaatcacatttttctacctacaaaaccaattttctttcagttctggtttttgtttctgaagcccatattttattacactgaatgaaacctgtgcatgggtaattcatttaaataaatat[135 bp omitted]tggtgaaaccccgtctctactaaaaaccaaaaattagccatgcgtggtgacatgcgccttgtagtcccagctacttgggaggctgaggtgggggaattgctggaaccttggaggcgggggttgcagtaagccgagatcatgccactgcactctagcctggcaacaagagtgagactctgtctcaaataataataataataaaataaaataataataaaagactaatgataccatatagtagcgaatagacattctcatagtatgttgaatattggtgcaaacttaatcagggcaattgatatagatgtgtaaacaggttttaactatgaaaacctcattctcagcaaaatatctaagactatccaaaatatacaattcacatgtgcacagaaaaggcatatgcagtaaaacattgcatataatgggaaaaagctggaaagaacttacatatacaaacagaacagtgcagccattaaaagattatgacacagttcataatttagtgacatgaaaatttgttcactatattttgttagaagaaacaagtagatttcaaaacaattgttatataaccctgttttgaatgaaaaagtcctataagcctatatccatgcacttattcacaaatgaggtgaagtgatttggaataaagtgttcaaagtgctttactttaagctttttttaatattctccaatcttctgaattaagaatctactaattttacaatgagagaaatctgctttgagagcagaaaaaataataataaaaggagatatgtgtatgatacatggaatgcaatgttgaaatggtctgaattctggctgaagagacccaaactttcttcatagacattccagagcactaattcaaatactgccttaaaggtcctaaatctagaatcctaagattttatacacaacgagttcctcttatcagttgcctctcatttacctgggcacagaactgctgttaaccaacctcttcacgaactattgctccaagaaggaaatcacatctggtttggacataaattaatagggtaattaataataaacccttcacataggcaaagaaatggaattttggtctgatgtggctatggagaattgagaccattccttaatcatcaagcagaaagaagtcaagaaagtattctgaaggattaggatgataacactttagaaataacacaggagagacgcccatttccaactctaggaatcttaaaccagtccttcagaaagttacctaagaaccctgaagtttccctaatcaatcagggtgaagaaagtaagatgttcccagaatacagaatttgaactggaaaggggaaaacagatgtaaaaagggagacccggctggccgaggtggctcatgcctgtaatcccaacactttgggagactgaggcaggcagatcacgtgaggtcaggagtttgagaccagcctggccaacttggcgaaaccccatgtctactaaaaatacaaaaattatccggacatggtggtgggcacctgtagtctcagctactcggaaggctgaggcaggagaatcccttgaacctgggaggcggaggttgcagtaagtcgagatcacgccactgcactccagcctgggcgacagagcaagactcggtctcaaaacaaaaaaaggggagaccaaattggctagttaaataaatgtatgtaggtgttatatcacacccctgaataattcctccgaatcggggtgggggtgtcagtcatctgtactccacccagaagtcaatgccacattcctgagtctacatacccgtgaaatgataggaacccatgtgcccataaggtcctggaggggaatgcaaagttggtcaagacatgggagctagacagcaaggaaaaggaattgcaaagggaagttagtagttaaataagttaccacatatccatgtaatataatactaagatagacaaatgcaaagttgtagaaaatagttaaggaatattttcaagatactgtatcagagaaatcactttacaaaacaggttgaacaatacaattatatcaatatggtcatttaaaaagtctagaaagttaaacacctgtttcagttatttattgctatataaccacctcaaaagtttatggcttaaaacaaaaaacaattagcttattatttggggggcttggcaatttgggcttggcttgcctgagtggttcttctgctgatcatattcatgtgacagctgtcagctgttggcctggtggaggctggatggttcaagatggtctccctgaaatttctggccgttgttgctcactggacctctctctccaagtgatctttaatgcgcaagcaagttgctcttagccttcagtcatggtggtctcagggcaggaaaaggggaagagaaaaagctgcaagacttcctgaagctttgtctcagaagtctcacaatatcacttccaccacattctattggtcaaagcacctcacaaggccctgcctaatagtaacctaaccactgactagcatttcaggaggagaaaaaatactcccttgctgaaaaacaaaatcaaagagaacaaaaatagaaaatacaacaaaacttccttgaccttggttttcagatatgctcagcaatggttccctttcctcagggctcttagagaacctcaaggcaagggagaaggggtaaggaatcatgagacatcagacctttcttggaacccagattggctaaattggaaaaaattattgccaccacacgagctctcatcatctaccataaacatactcagatggaagtaaaagggagatgggagtactgctaacccttcttagtattcaagggaaaggccagggtcactgatatccaggactggggactttctcaaaattcacgttaagtctcctgcggagacagctctgggaatgatgtggatcacatggaacctgacctctgagagttcccaagggagagcctctgaggaaggaatcctactcctaggttctccccacgacgtcttcccagaactctgcttaagggacacttacaactcgaaaagcctcgttccgaaaacaggtctgtcctttttctgtttgcagattttattccaccactcgattatcccttccctttttgatggccatttcactgcagctggggtctatacagctataaagcgggagaaaaaaggaagctgggaactcagagatgcagagcccaagaaacaatcgagtctaaaactgccgcttaggtgggcactccgccaggatcccctgtgtcaaacaccaggctgagaactggggacaggtgtgccctgagaagacaacgcgggccatgcttcattgcaagatgactctgcttaacataggcatggatcatagtcctcacaggcacattggggagatcttcgacagacccctcagtcccaacattaaacacagcactgcagaaatgaagctttacccgttacacacacaacaccacagacctaaaaggctcttccatcacacggccacagcagcactgtcatgatggaaggtctcaaaccctacagtgtcacacacccgacagccgaccacggccacccaaaggtcccgcatccgagcagggacaggaacacaatcacgcacctgtcgcagcctcctcgccgcgcacaccgccgccttgtcctggcatcaaacacacacgcacaggtgcatacacaggcccgagctacggccctgcacaccctgtctgcgtcccgggagctcggggcttcctcaccgtgagcgccgccctcatcccagccacgcactatgagaatttggaaggggaaccagagatcaaagttcgaaaaccgcccgggcgcctgtgggaaatgtagtccaaggccggaaacgcccggatgtggagaaggcgcgcgtagccggtggacagcaggaacgcgccgcggagacacctgggaggcatcgtccgcgtgggagtgcgcatgcgcagacgcccggccggcaaccgaaggtgaggctggtgggtcccgcgggcgcggagaaggcgggtgacggtgtgacccgtaaggaaggctgaggagggaggcgggagcctgggctggggaaagcaagaagggaagaggagcaacctgggacgaggagttggctggaggaaagtgcgagtccgggcctcagagaaggctgggagggaagcaggaaccagagcgcgggcccgggagcacctgaagaagggaaccggttgcccgaggcggggggtgagctccccagtggcaggaatttcgtctgattttcgtcccctggctcctggagcacggcctggcacacaacaggcgctccgtgtgtgtgtgtgtggcttttcgtacctgtcctgtgtgttgtggtaggggaatgtgttattctgtgtgacgttgtggaaccggttgtttatgaaagtgatagggtccctgcgtgtcttaagttttaatttaaattagatgcgagtcgatttgtgtttgagcctgtgtccgactctggagaggcgacagtgagggcattgtgagtgaaaggttgttactttttgtagaagttctgtgaaattgtgcacgacgtgggggcctatgggattatgactatgtagtgggtgatacagctatgaatatgcctaattttaaaagtatttggtgtacacgacctatgatgactgtgaatgtggcacactgtgtgacttaggtggagtgcttgagaaaccgagtgttgactaaagtatgcattgtttagattgatttatgagtattgggcattttatatatgcctgtagaatttgactctggtaattagacaagtaaaataagtagtgattttttttttttaatggagagg[135 bp omitted]taacatggtgaaaccccgtctctactaaaaatacaaaaaattaaccgggcgtggtggcgggcgcctgtagtcccagctacttgggaggctgagtcaggagaatggcgtgaacccgggaggcggagcttgcagtgagccgagatcgtgccactgcaatccagcctgggtggcagagcaagactccgtctcaaaaaaaaaaaaaagattgggcccatgcgcggtggctcacgcctgcaatcccagcactttgggaggctggggcggacagatcacctgaggtcaggagtttgaccagcatggtgaaaccccgtctctactaaaaaatataaaaattagctgggcatgatggcgcatgcctgtagccccagctactcgggagctgaggcaggggaatcgcttgaactcggaggtggaagttgcagtgagccaagatcgcgccactgcactccagcctgggcgacagaacgagactccgtcccttcccttccaaaaaagatcatttattgggaaacctggtattgactgatgactgatatgcttaaatgaatagaataccactgggaccacacagaaaaaaactttatctcataactgccactctcaaaattcctatttgagagtgtgtgtgtgtgtgtgtgtgtgtgtgtgtgtgtgtgtatttatttttttttttgctggatgaatttcttctgctggaagcctgaaatgtgaaaggatacatgattagtttcttctctaattccccaacctttattttgtctcctctttactccctataggcagtctttagctctcatggattgggagctgggaaaggaatgagaagacagaagtcagagacaagaagaggctaacatgactgataccactataatttagtgtaagtcatctcttaccttccaagagaacctgctgcttggaacctccagatacacttcccttctcatgggcatagcctcttctccagctgctgccccagtgcttcctctgggcattcagtggcccaccgactctggtgggtgggtttgtccagtcattcctctttgataggacccaagacaacccagacagcctccacccatggggtcttcacctagtgctaaggtgagaattagccacctcagtcactttgccctcccaaatcttagaaatatgtaaaatttttgccaagaattctctcaccactttggttcctggtggcctcagggtctgagggaccccttgtgtgttgtaaaaaagggagaatcactcacgtttttccccctggaaaaacactgttctaaaaataacagtctcttaaaaatacatgctcctctctcagcctctccactgtctttaaaggaggagtttaatgatagcaaaattttacactcaacagctctataagatcctgttcttgaatgaagttctcttagaattttgtttcatttgctatctttgggatatcagctgaggctgaggcagaaatatttctaagttttcatcctattaaaaattgaacagtgataacaattagaaaactcagggttgttggaaaaaacattaacaaataaatagggggtgtgtgtgtatgtggaaagtatggggaaaaagacttatttacagtggtcatcaaaaataagagatacaaaggaagtgactttactaattacatgatatgttattaaagagcacattttaaaataggacttttggtggggcttggtggctcatacctgtaatcccagcactttgggaggctgaggtgtgtgcactgcttgagtccaggagttcaagaccagcctgggcaacttagtgaaaccctgtctctacaaaaatacaaaaattagccaggcgtagtggcacgcccctgtggctagctactcaggagactgaggtgggaggatcacctgagcccagggaggtcgaggctgcagtgagccgtgatcacaccactgcactccagcctgggcaacagagtgagactttgtttcaaaacaaaacaaaagaaactataaaactcttaggaaaaaacacataggcatacatcttaatgatcttaaatttggcatgcattcttttggagtttctttcatggtgattgaaatgttctaaaattaggttgtggatgattgttcattatgatggtttgtgaatataccaacaaccattgaatcgtatactttagatggatgaattttatggtgtgtaaattatatctcaatgctgtcatttaaaaaatcttggctaggccacctctgcaatgtgtaacactgagcaagccatgagtgtctcctgtgttagtcatgttagtcaatttcaggtataataggacctacctcactcagggtttttgtgagggtcattggatctacatcacagggaattattttggaaagtgtaaagaaataattgaattccaaatatccaagagaaggaaactggttggattaaccaagtacagtgccactgaggagtattatgcagccatgaaaagggatcagttgcatggatttatggagaagggcctccaggatactttggatttttttgttttcttgttttgtttgtttgtttctgagacaaggtctccctccgttgcccaggctggagtgcagtggcttgatcatggctcactgcagcctcgatctccctgggctcaggtgatcctcccacctcagcctcccaagtagctgggactacaggcatgtacaaccatacctggctaattttattttattttatttttgtacagttgggggtcttgctatgtttcctaggctgttcttgaactcctaggctcaagtgatctgcccaccttggcctcctcaggtgctgggattataggtgtgagctaccttgcctggcctccaggatactttgttagtgacaaaagcaaccgaatattatattctatcttttatctaagctttcagcttatcctttcattattttaatataagcaaatgtatatatttggatttttttaaactcatgtcaccaccatcacccaaatttaaaaagaaaacaaaaacagaacacttctagcccccatccaatcaccctggcacagaagtaacctctgttgtaatttcatctcatataaaaggagtcatgcagaatgtagccttttgagtctggcttcattcagtaaggatgttgcaattagtaaactgtagctgggactacaagtacatgccatcatgctggctaatttgtgtatttttattttgcagagacagagtctcactatgttgcccaggctggtctcgaactcctgagctcatgcaatcctcctgccttgtcttcccaaagtgctgggattacaggcatgagctcagttcagttgcatgttgcaattcactcatattattgcatgtatcattgcttcattcttcttagtataaagtagtattccattgtctggatggatcacagttggtttgtctgtgtatccattgatgcacacttgggttgtttccagttctgaggtggttatgaataaaactgctacgaacattcacattcgggtctttttgtagatacatgtctttgtttgtcatggatagatactcaggagtggtattgatgggtcgtttaaacaattactttaaaatggtatctttacatggaatagttttgcctcttgattgtggtggtggtgacacaaatctaaatgtgtgataaaatggtaaaaacacgcacataatgaatgcatggaaaactagtgatatctgaaagaagttggtgcattgtgtaatgacaattttctgattttttgtttttattttttagagacagagtcttgctctgttgtccaggtcgaagtacagtggcacagtcatagttcattgtagcctcaaactcctgggcttaagtgaccctcctgcctcagcctcctgagtagctgggactacaggtacacgcccccatgctggctaatttgtgtatttttattttgtagagacagagtctcactatgtttcccaggctggtctcaaactcctaagctcatgcgatcttactgccttgtgctcccaaagtgatgggattacaggcatgagctacctactgtgctcaaccagttttctgattttgaccatatgctatggttatggaagatgtgaccattgtggagacgctaggtgaaaggtgaatgagacctctctgcactatttttgcaagcttctgtggatctataatcatttcaaaataaaaataaataaattttaaaaagagcctgctgcaagactgagaagtgcctatggtgtctgattccctgtcgttgggcatggattctgtttcctactctgggcccttttggacaaagccatgcagaatatcttatcccatacctgcccctgtgagccacttactctttctcaaagttttcagcaaccctgggagtaggcggtatgtggtggttcacacctataatcccagcactttgggaagccaaggcaggaagatcgcttgagcccaggaattggagactagcctaagcaacatagtaagaccccatttctaccaaaaaaaaaaaagttagccggtcttgatggcatgcgcctgtagtcccagctacccaggaggctgagataggaggatcacttgagcccagtgaggccgacgctgcaatgagcggtgataggccactgcactccatcctgggcaacagagtgagaccctgtctcaaaaacaaaaaaattaaaattaaaaaataattagctggatgtgggtggtacatgcctatggtccctgctatgcaagagggagaattgcttgagctgaggaagtcgaggctgcagtgagccatgatcatgccactgtattctagcctaggcaaagagtgagaccctgtctcaaaaataaaataaaaataagacttgaataaaaggacaggaagacacaacatgataaaatgtcaaaacttccttacatttcatggatttccattaaaattttaataaaaatgtttgaactttctagcattgttaggagaaaataaacaccaaaaattctgagagagaaaaactgtcaaggaagtagccctagtagatactaagctgttttaaaactgataactgtaaggtgatcctggcaattaaatgaacagttcagtggaaataaatataaagcccagctctacttagatatatgaaggacataaaatatgtgataaagatggcagttttgatgattgaaggaaatacagattctggagtactttgtgataccaaactagatggccaaataatttttaaaattgtatttttacatagaaaaaaaacagtcaaatgagaaactataaaaaattatttggggccgggcacaatggcttacgcctgtaatcacatataggaggagcacatgaggccaggagtttgagaccagcctgagcaacattgcaagaccccatctcaaaaaataataataatttaaaaaattagccaggcatggtgatgtgtgtcttttgtcctagctacttgggaggctgagacagaattgcttgagctcaggagtttgaggttgcagtgagctagaatagtaccactgtactccagcctggatggcagagtatgacactgtctctaaaagagaaaaattatttggaactcctaccacaaaaataaaggattaatttccttcctttaaagaagtctaacaattcagaaaataaaaatgatagaaaatgaaataaatgatgagaccacagataagaagctaaaagcgttctttaaacttatgaaaagaagcttcttgttcatggtaagaaaactagaaactagaaccacaatttacatgtgttagatagacaagcataaaaaaatttgtatcagtagtattcctcagtgtggaatgacaggtattctcatatattgctggcagtactatgaatggtacagccttaacggagagcagcttggaagtagttaataacagtaggctgactaggagagaaaaggtagtgcttgaggggagaggagcttgcccaaaatccatcctgctgccccaaaagcctgtatctctggccttggggataaaacagaatttgcctagctggttgtcccatctatatttatgtggcatgttcagagtggacaaggatcaatacaagggaaatggaggcaattttaatagaattataagagctgtgaggcacatgtggtctcatgtggctttttttgtctcggctttgcctccttaggaactgcctcttttctaaagaggactccaaaggaaggactggtcatctctttcatatctcaaaaccatggctcaggtaaggcgatggtttctctctcctttctgaaagtcttttttttttttttttttaaggatatttgggcatgtgtcggtcttgtcctacatcctcctacctatctttcccttcagaaaactggtcctcacttcttcccatattggtcagataagactctaccttccacaaatgctcccaattttaaccaatgttgacacattaagtggataaatcaggccaggcatggtggctcacaccttaacagcacttcgctcccagcactttgagaggctgaggcaggagaattgcgagtccaggagttcaagaccagccagcctgggcaacata[140 bp omitted]catggtgaaatgctgtctctactaaaaatataaaaattagctgggcttggtggcaggcgcctgtaatcccagccagttgggaggctgaggcaagataattgcttgaatccaggaggcagaggttgcagtgagtgaagattacgctgctgcactccagcatgggtgtcaaagtgagactctatctcaaaaaaagaaaaaaattagcccagtgcaggtgcagtggcatgcacctgtggtcccagttatttgggaggtttaggtgggaggatggcttaagcccagaggtcaggtctacaatgagccatgatgtcactgcacttcagcctgggtgacagaacaagactctctttattaaaaaaaaaaaaaatagtggatatatcattcaccatctcctctctcagtcttcttccagaagctatgcagggacaaaaatgcatttccttgaactaaatgaaaatgtattactgaatgaacctgtcttgtgtagattaaaaaaatatataaggctttattgcatccacagactggagtcaagatggtagtgaaattgacagaatttatatagaattagtaagtagcaagaagtcttgtgttgaggctttgaggatggaaacgtgattggcaacttgtacaaaaaactgagaatcttgtgtttcttctctaccttcagttttgctcacagctgctaacaatttctaaaaatctgtggccttccaataacaccttcttagtatattaattgtattctagatttatttctattttcacatttcttccaattttatgtttgcatgtagaagtaaatatatttgtatagactgccatactaaactagaagtgtaactcctaaaatattctgcttctggtttcaaagacactactctttcttgtttcagtcagaacatttatcttcgtatctggacctcttaaatactggtgttctccagattctgtattggttctcttctatttacactctcctgttcactacctaccactattattctaatgctgctcaagtaattttgattctaaacctctgtcttttttgatgtattgtcgaaactatatatccagcctccagctagatatcgccacctacatgttccgcagatccttcatgcacatgtctgagattcacctcattgtctccttctgcccatcctatccttttgtttttttccaatctggttagggccccaacccctacccacctgccaatacagccaacatgagttaaaagtctcccattcactgcaaaactattgagtggtaaattctgttcctcttaccacagttccctccatcctccactgataccatccttatttgggttcctttctcatagtggtcacttgtcttcccatttaacatcttcacttattttccacttctccaagggctcaccccaatgcttgcttacatatttttgttttctgtgcttttgtgtttaactttttattatggtaaaatatacataacagagagcttaccgttttaaccattttttagcgtataattcaaagccattaagtacgttcacaagttgtgtaactgtcaccactatctatttccggaactgtttttcttcatttcacatagaaattctgtaccaataacactaaacagttactcccaattttattctttatagcatcagatggaaagtgccttagaggaatgtatatagacatttcattaggagacaagaaaatgttaaaatgcttataacagtttaaatacgagaataataatcattaatgctaatagagttttccagttaatgaacatgatgcacatctccttttatttagatcttccttaaattctctcagtaatgttcctttcagtgtaccagtcttgtaaatgttttttatatccttggatattttttaatgctgctgtaaatggtgttcatttttatttaaatttcccactgtttattgctagtatgtgaaaatgcaattgatttttttatcttgacctgcaacctttcaaaactctcttattctagtaattttttttttgttagattcttaggattttctatatggacaatcctgtcatatgtgaataatgactgttttctttctttctaatctatattcccttcatttctgtctttccttactacattgtctagaaccttcagtacaatgttgagtagaagttctaagaacagactttcttgtcttgtgcccaacttaggcaaaaggcattgtttttcattattaagtttgatattagctataggattaggatttttttttctttttttttttttcttgagacagagtcttgtcctgtcatccaggctggagtgcagtggtggatctcagcttactgcaacctctgcctcccaggttcaagcgattctggtgcgtcagcctcccacgtagctgggattacaggcatgcaccaccatgctggcctaatttttgtatttttagtagagacagcatttcaccatattggcgaggctggtcttgaactctggcctcaagtgttctgcctgccttggcttccccaagtattggcattacaggtgtgagccaccatgtccggctggaatttcttttttttttttttttttattatactttaagttttagggtacatgtgcacaatgtgcaggttagttacatatgtatacatgtgccatgctggtgtgctgcacccattaactcgtcatttagcattaggtatatctcctaatgctatccctcccccctctccccacccgacaacagtccccagagtgtgatgttccccttcctgtgtccatgtgttctcattgttcagttcccatctataagtgagaacatgcggtgtttgattttttgtccttgtgatagtttacggagaatgatgatttccaatttcatccatgtccctacaaaggacatgaactcatcattttttatggctgcatagtatttcatggtgtatatgtgccacattttcttaatccagtctatcattgttggacatttgggttggttccaagtctttgctattgtgaatagtgccgcagtaaacatacgtgtgcatgtgtctttatagcagcatgatttatactcctttgggtatatacccagtaatgggatggctgggtcaaatggtatttctagttctagatccctgaggaatcgccacactgacttccacaatggttgaactagtttacagtcccaccaacagtgtaaaagtgttcctatttctccacatcctctccagcacctgttgtttcctgactttttaatgattgccattctaactggtgtgagatggtatctcattgtggttttgatttgcatttctctgatggccagtgatgatgagcattttttcatgtgtcttttggctgcataaatgtcttcttttgagaagtgtctgttcatatcgtttgcccactttttgatggggttgtttttttcttgtaaatttgtttgagttcattatagattctggatattagccctttgtcagatgagtaggttgcgaaaattttctcccattttgtaggttgcctgttctctctgatggtagtttcttttgctatgcagaagctctttagtttaattagatcccatttgtcaatcttagcttttgttgccattgcttttggtgttttagtcatggagtccttgcccatgcctatgtcctgaatggtattgcctaggttttcttctagggtttttatggttttaggtctaacgtttaagtctttaatccatcttgaattaatttttgtataaggtgtaaggaagggatccagtttcagctttctacatatggctagccagttttcccagcaccatttattaaatagggaatcctttccccattgcttgtttttctcagatttgtcaaagctcagatagttgtagataagtggcattatttctgagggctctgttctgttccattgatctatatctctgttttggtaccagtaccatgctgttttagttactgtaaccttgtagtatagtttgaagtcaggtagcgtgatgcctccagctttgttctttcggcttaggattgacttggcgatgtgggctcttttttggttccatatgaactttaaagtagttttttccaattctgtgaagaaagtcagtggtagcttgatggggatggcattgaatctataaattaccttggtcagtatggccattttcacgatattgattcttcctacccatgagcatggaatgttcttccatttgtttgtattctcttttatttcattgagcagtggtttgtagttctccttgaagaggtccttcacatcccttgtaagttggattcctaagtattttattctctttgaagcagttgtgaatgggcgttcactcatgatttggctctctgtttgtctgttattggtgtataagaatgcttgtgatttttgtacattgattttgtatcctgagactttcctgaagttgcttatcagcttaaggagattttgggctgagacaatggggttttctagatatacaatcatgtcgtctgcaaacagggacaatttgacttcctcttttcctaattgaataccctttatttccttctcctgcctaattgccctggccagaacttccaacactatgttgaataggagtggtgagagagggcatccctgtcttgtgccagttttcaaagggaatgcttccagtttttgcccattcagtatgatattggctgtgggtttgtcatagatagctcttattattttgagatacgtcccatcaatacctaatttattgagagtttttagcatgaagggttgttgaattttgtcaaaggccttttctgcatctattgagataatcatgtggtttttgtctttggttctgtttatatgctggattacatttattggtttgtgtatattgaaccagccttgcatcccagggatgaagcccacttgatcatggtggataagctttttgatgtgctgctggattcggtttgccagtattttattgaggatttttgcatcaatgttcatcaaggatattggtctaaaattctcttttttggttttgtctctgcccggctttggtatcaggatgatgctggcctcataaaatgagttagggaggattccctctttttctattgattggaatagtttcagaaggaatggtaccagttcctccttgtacctctggtagaattcggctgtgaatccatctggtcctggactctttttggttggtaagctattgattattgccacaatttcagatcctgttattggtctattcagagattcaacttcttcctggttagtcttgggagagtgtatgtgtcgaggaatttatccatttcttctagattttctagtttatttgcgtagaggtgtttgtagtatcctctgatggtagtttgtatttctgtgggatcggtggtgatatcccatttatcatcttttattgcgtctatttgattcttttctctttttttctttattagtcttgctagcggtctatcaattttgttgatcctttcaaaaaaccagctcctggattcattaattttttgaagggttttttttgtctctatttccttcagttctgctctgattttagttatttcttgccttctgctagcttttgaatgtgtttgctcttgcttctctagttcttttaattgtgatgttagggtgtcaattttggatctttcctgctttctcttgtgggcatttagtgctataaatttccctctacacactgctttgaatgtgtcccagagattctggtatgttgtgcttttgttctcgttggtttcaaagaacatcttgatttctgccttcatttcattatgtacccagtagtcattcaggagcaggttgttcagtttccatttagttgagcggttttgagtgagtttcttaatcttgagttctagtttgattgcactgtggtctgagagacagtttgttataatttctgttcttttacatttgctgaggagagctttacttccaagtatgtggtcaattttggaataggtgtggtgtggtgctgaaaaaaatgtatattctgttgatttggggtggagagttctgtagatgtctattaggtccgcttggtgcagagctgagttcaattcctgggtatccttgttaactttctgtctcgttgatctgtctaatgttgacagtggggtgttaaagtctctcccattattattgtgtgggagtctaagtctctttctaggtctctaaggacttgctttatgcatctgggtgctcctgtattgggtgcatatatatttaggatagttagctcttcttgttgaattgatccctttaccattatgtaatggccttctttgtctcttttgatcttcgttggtttaaagtctgttttatcagagactaggattgcaacccctgcctttttttgttttccatttgcttggtagatcttcctccatccttttattttgagcctatgtgtgtctctgcacgtgagatgggtttcctgaatacagcacactgatgggtcttgactctatccaatttgccagtctgtgtcttttaattggagcatttagcctatttacatttaaggttaatattgttatgtgtgaatttgatcctgtcattatgatgatagctggttattttgcttgttagttgatgcagtttcttcctagtctcgatggtctttacattttggcatgattttgcagcggctggtactggttgttcctttccacgtttagtgcttccttcaggagctcttttagggcaggcctggtggtgacaaaaatctctcagcatttgcttgtctgtaaagtattgtatttctccttcacttatgaagcttagtttggctggatatgaaattctgggttgaaaattcttttctttaagaatgttgaatattggcccccactgtcttctggcttgtagagtttctggcgagagatccgctgttagtctgatgggcttccctttgtgggtaacccgacctttctctctggctgcccttaacattttttccttcatttcaacttcggtgaatctgacaattatgtgtcttggagttgctcttctcgaggagtatctttgtggcattctctgtatttcctgaatctgaatgttggcctgccttgctagattggggaagttctcctggataatatcctgcagagtgttttccaacttggttccattctccctgtcactttcaggtacaccaatcagacgtagatttggtcttttcaaatagtcccatatttcttggaggctttgttcgtttctttttattcttttttctctaaacttcccttcttgcttcatttcattcatttgatcttccatcattgataccctttcttccagttgatcgcatcggctcctgaggcttctgcattcttcatgtagttctcgagccttggctttcagctccatcagctcctttaagcacttctctgtgttggttattctagttatacattcatctaaatttttttcaaagttttcaacttctttgcctttggtttgaatttcttcctgtagctcagagtagtttgatcatctgaagccttcttctctcaactcgtcaaagtcattctccgtccagctttgttctgttgctggtgaggaactgtgttcctttggaggaggagaggtgctctgctttttagagtttccagtttttctgctctgttttttccccatctttgtggttttatctacttttggtctttgatgatggtgatgtacagatgggtttttggtgtggatgtcctttctgtttgttagttttccttctaacagacaggaccctcagctgcaggtctgttggagtttgctagaggtccactccagaccttgtttgcctgggtatcagcagcagtgtctgcagaactgcggattttcgtgatccgcaaatgctgctgtctgatcggtcctctggaagttttgtctcagaggagtacccggccgtgtgaggtgtcagtctgcccctactggggggggtgcctcccagttaggctgctcgggggtcaggggtcagggacccacttgaggaggcagtctgcccgttctcagatctccagctgcatgctgggagaaccactgctctcttcaaagctgtcagacagggacatttaagtctgcagaggttactgctgtctttttgtttgtctgtgccctgcccccagaggtggagcctacagaggcaggcaggtctccttgagctgtggtgggctccacccagttcgagcttcccggctgctttgtttacctaagtgagcctggacaatggagggcacgtctaccccagcctcactgccgccttgcagtttgatctcagactgctgtgctagcaatcagcgagactccgtgggcataggaccctccgagccaggtgcggaatataatctcctggtgccccgtttcctaagcccgtcagaaaagcgcagtatttgggtaggagtgacccgattttccaggtgccatctgtcacccctttccttgaccaggaaagggaacatcgtgaccccttgcgcttcccgagtgaggcaatgcctcgccctgcttcgtctcgcgcatggtgcgctgcacccactgtcctgcgcccactgtctggcactccctagtgagatgaacccggtacctcagatggaaatgcagaaatcacctgtcttctgcatcgctcacgctgggagctgtagaccagagctgttcctatttggcctggaatttcttttttaaatgattgaagacattccagtttgctgatagtttttatcatgaatgagtgttaaattttctcaaaagtttttctgggccaggtgtggtggctcatgcctgtaatctcagcactttgggaggccagggcaggcgaatcacttgagccaggagttcaagactggcctgggcaacatacaaaaatacaaaaaaaattatctggatgtggtgggcgcctgtaatcctagttgctcaggaggctgagacaggagaatcgcttgaacccaggaggtggaggttgcagtgagccaaggtggtgccactgcactccagcctgggcaacaaagagtaaaactccatctcaaaacaaaacaaaaaacaaaaaaagtgtttcttcatctattggtttttcacattatatggcttttttctttttttaatattactataatgaattatgttgattgatttttgaaaaatttagttgtcctgggataaactccacttggtcatgatataatacttttgtatatattgttttatatattaaatatgatgaatttgctaatatgttgttactgatttttcttgtctgtggttcataatggatctaatgtatagtttttctgtttgatgtcagggtaatgctatctcataaatgaattgggttgtattctctcctcttattattttctgaaagaatttatatagaattggtattatttcttaaacgtttgttagaattcactgtgaagccatctatctgacttggagatttctttgtggaaagttgtttaaccagtagttcaattttggtaatagaatgaagactgttcaggttatcagtttttcttttaattcaatgagcttttgtagtttgtgactgtctaggaatttgttcagttcatctaagttgtaaaatgtattggcataaagttgttgccctttttatccttttgatgtttgtataatctgtaacaataccccttttttattcttgttattgatgatttgtatgtctcactttttcccctggttctttggctacaggtatatcaatgtagttgatcttttcaaagtaccacagcagcttttagtttcatggatttcttctagtatttttgttacctcatttctcctcttttattttgtatttcctttccctctcatgactttgggtataattagctcttcttttccaattcttacatagatggaagtgtacattgagttaagacatttctttttttctaatagaagctttaaatgctataaatttctctgtaagcactatttaaagggctcccaagttttgacatgttgcattttcttattcagttgaaaatattttctaattttctcatgtttgttttttgctcattggttatttagaaatgtgtttaatttccaaatatttggggattttccaaatagcttcctgtaactggttctagtttaattctgtttcagtcagagcagagtctatatgatgtcttcctaaatttatggagacttcttttatagcacagagtacagtttaatttggtcagtgttctctgtgcccttgtaaagaatgcatattctgatgttattgggtgtaccctgtaaatatcagtgagattaaattggttgattgtgttgaaagttttctgtattcttattgttcttcagtctgttaaagcaatgactgaaggaagaaagttgaaatcttctattataactaagctttgtttttagatgcatttatatttaggattgttgtatcctctcatgaattcaccctgtcctattattatgaaatgcttcaattaatccttgataatattctaaataatattgtcctgaaatctattttggttaatatttttatagccattctaactttcttatgattgtatggtatctttgttctttgtgctgctataacagaatgcctgaaactggataatttatgaagaacaaaaataaattttctcacaattctggaggctgggaggtccaagataaagattcaggcaggtttgggtttctggtggggtctgttctctgcttccaagatggcaccttgaggctctgtcctcacatggcaaaagtacaagccagccacatgctacgtgaagccccttttacaagggccttaatcccattcacaaagggagaaatcttaatgactggcctaatcacgtattaaaggccctacttcgtaatactatcacattggcaacacctgaacgttgtttggtttttgtttcgagatagggcctcgctttgtagcccaggctggatttcagtggcacaatcatggctcacttcagcctcaacatcctgggctcatgggatcctctcacgtcagcctcctgagtagctgatactacaggcatgtgacaccatgcccagctaatttttctgttttttatagagacacaatttcaccatgttgcctaggctggtcttgagcttttgggttcaaccaatctgcctgccttggcctcccaaagtgctaggattacaggtgtgagccactgtgcctggcctacacctgaattttagaggggacacattcaaactatagtatatgatatacctgatttccatcctttttactgttggtttttttttttgttttttttttgagacaggatcttgttctgtcacccagactggagggcagtggtgcaatcaacctcccaggatccagcaatcctcccaccgtagccacctgagtagctaggactgcaggcatgtgccacctcatctggctaatttttaaattttttatagaggtggggtctcactatgttgcctaggctggtcttgaactcctgggtccaagtgatcttcctgcctggcctcccaaagtgctgggattataggtgtgagccactgcaccttgcccatcctttatacttttatttacctatgttttaacgtttatagttaatctggtacagctagtagatggtttggtttttcttttttcctccaatctgatactcttatcttttaattggagtttttagtccattcaatgtaattatcaatatagttgaatttaaatatgccatcttcctattttttccaattatgttttctttttttttagattgagaaattttttatgatttcatttgtttctgtattatttattcacttattagaagtacttctttattttcttgtttgttttgttttttagtggttgctctaggccagaggttggcaaaccattgcatttgagctaagtcaggcatgatgcctggttttgtagagttttattggaactcagccaacggtgaaagcattttgcttagtttatattgctttctttctcttcaagttcactgatcttttctttcttcaatgtgtaatctgttgttactaccacccgttgtatttttcatatcatgtatttttcttctctagaacttttctttgatcctttttatatcttccatttctctcatgtttatctttttttctacattcttgagcttatggagtatgtttataatcctgttttgttgttgttgttgttgaaacggagttttactcttgtcgctcaggctagagtgcaatggtgtgatctcagctcactgcaacctctgccttccgggtttaagtgattctcctgcctcagcctcctgagtagctgggattacaggcacctgccaccatgcccggctaatttttgtatgtttagtggagattggggtttcaccattt[135 bp omitted]ttgtttgagactctgttgcccaggctggagtgcagtggtacaatcagagctcactgcagcctctaactcctgggctcaagcgatccccccacctcagtctccagtgtagctgggaccacaggtgtgtgccaccacacctagctaatttttaaattttttgtagagacagggttttgctatgttgcccaggctggtctcctgggctcaagtgatcttcctgtctcagcttcccagagttctggaattactggcatgagccactgtgcccagcccatcttgtttgttaaatccatcacctctgtcatttctgggtctgtttcttttgatcattttttttccctcatgaatattagtcctattttgcatgcttggaaattttttacttgaattttaaattgctgaatgctggattttgttatgttacgttaaagaattaagttacttcagtccattttgatccttttgaggcttgcttttaagtttttgttagtgtaggtcaagagcagcattttggtctacggctaatttagtccgattcctggagctacattaacacattattttcacccaaaattcatagtttacattagggttcactattgatattgataatgtgggttttgacaaatatataatggcacatattcaccattatattatcttacaaaatggtttcactgccctaaaaatcctctttgctctgcctatttatccctccctccctgctaccccctggaaaccactgatctttttactctctccaaaatgttgccttttgcagaatgccatttggttagaatctggaagactatataccatgtagccttttcagagtggcttcattcacttcgtaatatgcatttgaattcctcctaacccgttcttgcttatctgttcctacattctgttgtattttgtgtcagtcacatacgttttaatgattcatttcattcctctgttagctttttagttatgcgtttgcattttttgtgtgattgccctaggattacagtatggatcttcaacttaccaggattttcttaaggttaatattaaattagttatggtaaaaatatatcaatcttgccacattatagtttcatttattaatacctgtcttttacttttttgtttgccatgtatatgatatttatgtttgcaataagtggtattagaagggtctgtagtccacaggccaaaatccagcctgtttcctattttgtacagattgtgagctaagaattgtctttgcatttgaaacgtttgaaaacatttacaagaaaaaatattcctgacacactaaaacttcatgaaatttaaatgttagtgtccataactaagttttattgaaacacatctttgctcatttatttacatattatctatggttgctttcatgctaaaatagcagaagacattccctgactgctgcttgaaacagtcatatctcataaagaagaaaggaaatgaatatttatactcttacaatttttcttattttcttcataccttcctaaagaccttagtgttatttttaccttaagcctgaagaatttcctttaggccccaccaccccttccccttcccccactccagagatagagatctcactttgttgcccaggctgatctcaaactcctggcttcaagcagtcttcctgcctcagccccacaaagtgcccggattacagaagtaagccaccacgcccagcctattagcatttttgatggtgcagtcctgctggtgatgttgcccaggctgatctcaaactcctagcttcaagcagtcttcctgcctcagccctccaaagtgcccagattacaaaagtaagccaccacacccagcctattagtatttttgatggtgcattcctgctggtgatgaattctctaggttttatctgaaaatatctttatgttgccttcattttgaatatatagttttgctgcgtgtagaattcttggctgtgtagcagtttaattaggatttggctaagtgtggttttctttggtgtttatccttttagggttaattaaactccttgaatatgtaaattaaaagttcttgccaagtttggagttaggccattatttccataaaatttatttatgccctttctttttctctccccattctgggactctaattatatccatgttggatttttgaatatgacctatggatctttgtgagtctgttcatttttcatgattcttttttctttctgttcagattacttactttctcttgattgatttacacagatactgattctctatttctgtgctcctatcgagcttctctagttaattttttatttcagttatttctttgaatacatttagaacagctactttgaagccttttttttttttttttttttttggcaaaatctgacatcagggcccactaggagttagtttctgtgattgtctttttgtgactacaggttttattccccccactcctttttgttttgttttgtttgcatgtttagtaatttttgctagaaaactggacatcataaatagtattgtaatctgaattctgttatatctgttatgttcttctgagaattattattatttttagtaggcaattagcttgcttgtaatcaaacatcaaactttgtcttcctgctcagtgtaaagcagctgatatatcctcttagttcttcaagcttctagctgctgccttttaccctaacctcctgaaagcagataggttctctcttgtgttcatctgcttttctctcaatcaaggaattggtgagtgtttagatttgggggctcacgtcctgcatttctctttttcaagttttaccctctacacttcctgctgctttgtcagttcaagctctgacaccttaatcccgtaagccttaaattttattcttcttgggctatgagcaggttgtggaataccatcagtcaagaagcagaagccttagaatcttattaggtgcacttttatttttcaagattcttttctgttgtatttctgcctgctttttgctaagccctcggtgatctctccaacacatgcatattttatcaaccaggagtttggcagagtttatgctcagattttcattttcatccgttctgtagttccctcacttccagaattaacctaaatttccagctctcactttttgtgtgtgtgtgtgtgtgtgacacagtctctctctgtcacccagactggagtgcagtggcacaatctcggctcactacaacctccatctcccgggttcaagcgattgtactgcctcagcctcccaagtagcaggattacaggcacccaccaccacacccagctaatttttgtatttttagtagagacagggtcttgccatgttagctgggctggttttgaactcctgacctcagatgagccaccacgcccagcctcaagctctcgtttctgtcctcccgtcacctttgaggaagtaagtggtggttttatgccatgagagctgtggggtttcaggtaccatgatgcaaaaacagccacaaaattagcagttcttgtacattgcagttgctatccttcaaggataagctcttttccagtttccgcctgctttggttgctttccagtgctattagttgtttattgtatggcatgtgcacattttataattattatctgagggaaagtgtccctgactgttttactctgttaatgctgcatgctgaaaaatctcaccatgcacatacaatattcctccttagtgaagcctgagaaattgttctacctttgtgatacatgctgtatcttgtacatacttctttgttgtacctgtgacaccttcttgcaggtttgtgtttacttacattttcttgcaagtatgtgttacatgcctctggtaacttctgagcagaaacagtgtttgtcttggcacttccataaataaatacagtttttggcattaagtggcttcacagtaaatattcttagaatgtgttatttaaaaactaactgatggatatttttaccttgatttttgttttccctacaatataaatcataaaacagggaaaattgtagtctttctatattaggattcgtatgactgccacaaggaagcagggtcaaaagtagttcccaatatccagtccacctgttctttttcttttccttttttttgacagagtcctgctctgtcgcccaggctggagtgcagtggcatgatctgggctcactgcatcctccgcctcctggtttcaagctattctcctgcctcagcctcccatgtaactgggattacaggcgcacaccactatgcccagctaattttttgtatttttagtagacatggggtttcac[131 bp omitted]cattctagggatcagtgtctttcaatgatgtgactgtggacttcactcaggaggagtggcagcacctggatcatgctcagaagactctatatatggatgtgatgttggaaaactattgccacctcatctctgtgggtaagaaaaatcctctttgaaactttagtagcatgcacttcctctcaaagtgcctaattgtgtataatcttgaatttcaggaataagaggtgatgaattccttttcgttagcagaatgaatgattgtgtcttcacttacccagtgcaaggtgctacctatattgttacacaaatgggtgtcttaatttgcagtactgaacatgcccctttcctcatttttcagtggtattatagcccaatcaacttaagtctttttttcacttttcagggtgtcacatgaccaaacctgatgtgatcctcaagttggaacgaggagaagagccatggacatcatttgcaggtcatacctgcttgggtgagtttctggctcttaggcagacacagtctagcagaatgtaaatttaaaagggtcaagtgggggtgatacctttgaaatgtttcaggagtatctttttttaaaggctcttgacctctgaaaaccttcatgcctataaaactcaaaaccagacctttaggctaggtatggtggctcatgcctataatctgacactttgggaggccaaggtgagaggatcacttgaggccacgagttcagagccagcctggacagcatagcaagaccccatcactacaaaaagataaaaataaaaaattagccaaggttgggtgtggtggctcacacctttcatcccagcactttgggaggccaagatgggcagatcccttgagcccaggagtttgcaaccagcctgagaatcatggcaaaaccccatctttacaaaaaaaatacaaaagttagctgggcatggtggtgtgcacctttagtcccagctactcaggaagctaaggtgggaggatcacttgagcccaggaagtcaagtctgtggtcagctgtgattgcaccactccaacctgggagacagagcaagagcctgtctcaaaaaaaaaaaagccaggaatgatggcatacacctgtggttccagctactcagaaggttgaggtaggagaatcacttgagcccaaggattcaaggttacagtgagctaggattataccactacacaccagcctgggctacagagccaagaccctgtctcaaaaacaaaaacagaaccagacttttaaatatcactctctccggctgggcacggtggctcacacctgtaatcctagcacttcgggaggctgaggcgggcagatcacctgaggtcaggagtttgaaaccaacctggccaacataatgaaaccctgtctctactaaaaatacaaaaattagctgggtgtggtggcacatgcctgtaatcccagcgactcaggaggctgaggccggagaatcgcttaaacccggtaggcggaggttccggtgagccaagatcgtgccattgcactccagcctgggcaacagagcaagactccatttcaaaaaaaataataatacactatatatatcactctccccaaatacattctttcctagtttgcttcatattatcaaaaacaactgccactctgaatgtaccataagccatctttcttttagatcttttttattagctcgtgtatctttttccagccttctcagtccttatcttgccattgtgataagttttgtcaggaaaggtttatttatttatttacttattggttgttttttgtttttgtttttgagatggagtcttactctgtagcccaggctggaatgcagtgacgtcatcttggctcactgcaacctccgcctcccaggttcaaatgattctcctgcctcagcctcctaagtagctgggattacaggtgcgcatcaacaggcctggctaacttttttgtatttttagtagagatggggtttcaccatgttggccaggctggtctcaaactcctgaccttgtgatctgcccacctcggcctcacaaagtgctgggattacaggcttgagccactgcacctggcaccattgtaatagatttctttcaggctttcttcatcctgtctttaaaaagagaaaattattggttagtggtcctctccttacttacttaacatttcctttccttcataccacctcggctttgttttctgtgctaagctccccttctcactacaaatttagctattaattttagaactcacttaacacaacccaggttgataaagtcaaagttgccattttcttccataaaacctttgtggttcattttacatggcttttcatcattcctgcaatcaatcctttgtttaagtgaaataacactaattcttatcctaattccttgaatgcttatttacaacttggcctgttttctttaccactgtggccatatcacctgaaaaatgcttggcatataatagtcataacagattttatttttttaaataaatgtttattgtttcacttaacactcggtcttatttctctcatatgccctcacatgatctacctttcaattataatgattccatgcattctcagactgatgctgtttattttatgtagatggcactgacgtcaacatacaaagcacatttctcctaccttcactccagttcatcaggcgtactacagtctatcatctcacctattttctgacaatgtgtcagaaatgaaaatcactgactttctcagctcttaaatttttccccactatttatttatttatttattatttttgagatggagtcctgctgtgccacccaggctggagtgcagtggttcagtctcggctcactgcaaactccacctcctgggttcaagtgattctcctgcctcagcctctggggtagctgggattacaggtgcccaccaccatgcccggctaatttttgtatttttagtagagatggggtttcaccatgttggccaggctggtctcgaactcctgacctcaggtgatccacctgcctcagcctcccaaagtgctcagattacaggcatgagccaccgtgcctggcctcccattatttaactcaaaataataataataataataataataataataattattattattattattattattattattattatttgagatggagtttcgttcttgttgcccaggctggagtgcaatggctcgatctcgactcaccgcaacctccggctcccaggttcaagcaattcttctgcctcagcctcctggttagctgggattacaggcatgagccaccacacccggctaattttgtatttttagtagagatggggcttctccatgttggtcaggctggtcttgaactcctgacctcaggcaatctgcccgtgtcagcctcccaaagtgctgggattacaggcctgagccaccgtgcccaatcccttcaaatttattttgtttctactacaaagtcaacttgatttttctgtctctcttatcatttcttatggatctcttcacaatttgtaatatgtttatcagcttgtgaaatatattgacatcctcccatattctgatttctcactgatgtcatacaaaatgacaactatcttatttcatgtatttattactggaattaccatttgtctttgtggtaaattttgtctggattcattcaatgtatattgttactttcctcacaaaatataccatcagtttttccctttttttttatcatttattctatgaaatggaaatttctcttctttcaggaactgtcacaataagccctcatctggtcttttcaactttctcttggagaaaattcttgataatttccacttgatctagtctcctaattgttgttcatgaatgtagggtttgtcatcacatagatacttttcattgtgttgtgttctccctttatactatatcttttaagtctcaagatttctctgtgaaatcttccttgattactgcacatcatatctaccttcctttttttctgaattcctgtcctaactactgactataacacaaacatgcacaactcttgaatagtcatataatttcattcctaattgtttttgcttaaggatttttaaggatgcttaaggattctttccctcaaaaataagatcccttttgaatcttcatttctttgaaggaatcaagcattcttaaggattcttttcctcaaagataagatcccttttgaaccttcattactgtggtattatttaacatgttaggtattcagtagttactgtgttaattgcttatggagctatgtaagggagatatcttttcatccattcagaaagcatatactagcaagttccttttagatgtacctactcatgctgtgtccctacagattgtgcttgaagtggttgcattctgccagacaccacctaactatgagtatgcagtgatcatgtaaaatttttttttttaagatggagtcttgttctgtcgtccaggctggagtgcagtggcacgatctcagctcactgtaaactctgccttccgggttcaagtaatgctcctgactcagcctctggagtagctgggagtacaggtgcatgccaccatgcccggccagctttttttgtatttttagtagggacagtttcaccatgttggccaggctggtctggaactcctgacctcaggtgatctgcccgcttcggcttgccaaagtgctgggattacaggcatgagcaaccgtgcccagcccaaaagagtttaaagatcaccaataaagtatttatttctatgaagaaggatcactatcgagtctgcatttttcatgaaatatttatgtcaaagtgtaaggttgttaaaagatttgttaacagagttttcctaggcaataattatattgcaaattttaaagaagtagagcttaaaatggtaggggaaacatatgaagggtttatgagatcatggaatggtatgatttctttgaagattctctaaagataaatagaaataaacctggaaggcaagctaattaattaaaagaatgtgtgcacaagtgtgttattaggaataagtaaggtatatatagggcagtaagtatcaggcctgactgaggcaaaaactacctgttataaacaggtgagatctgtcaggtatgtggacaaccctgaaaacttgtgagaatataaaaaatgaatctagacaatatagttttgtttacaggagaaattccttgtatatgttagaattgaagttcttggactcaatgaagaaatagatttttgagcatagctttaacattgcttcatcagatatagatgattgcaaggtaagtaaagttagaaatagctatacttttataagagaaatgaaggttaaagttactctgatttaggaccagattgttcaatctaccatttgaaattggtattctgatctaccatatgaaaaactggaataaaggaatgttactgcattggggaaggatgtaagccagtcttaaacctggaaaagtgagtcagtaactgaaaagaggactaggcatgagagctttgttattgaacaattctgaaagaagtgatttagcagcagtctgaatatagcaattgaatatattctgatcttttttaaagttgctatcggaagtattttcctaattttccattcataagagaaaataatacataattatgtagaggattagagcatagactgtagaaaatgaattgataatttaaaagctaaattaatcaatgttgactacatagaaagaggaggtgggttgaacagctggaagtgttttaccacagtcatctagggatgtgtgtataaaagtattggtgatcagccgggcacagtggctcatacctgtaatcccagcattttgggaggccaaggtgggcagatcatgaggtcaggagttcgagaccaacctggccagcatggtgaaaccccgtctctactaaaaatacaaaaaattagctaggcgtggtggcacatgcctgtaatcccagctattcaggaggctgaggcaggagaatcgcttgaacccaggaggcagaggttgcagtgagccgagatcacgccactgcactccagcctgggtgacaaagcgagactttgtctcaaaaaaaaataataataattattataggtgatctgtgtcctccagaagtaatctttcctctagtattttcgctaaacaaagatttctgctaatttttcttgtccatcctacttacattttaatgcttttgataggttcacttcattttttctgaacacttatctaaccatcaacccccttctaccattctttgacttcttggttggtttcactttctctaagaagttttagtgcaaaatgcaaaaggtattaatgtttattgtttacatcttcatccttttccactctgaagcagtttttgtttaggttcccctccccgcacccctgccaggccagtggtcatttgttctgagtctctttttgcgccatgtgctagaccctagtaaaatttctttgcataggaaatgtgtgaagattcacaaattgttatcaattatattcttttctagaagaaaactggaaagctgaagactttttagtgaaattcaaggaacaccaagagaagtattctagatcagttgtaagcatcaaccacaaaaaactggtgaaggagaagagtaaaatatatgaaaagacatttactctaggcaaaaaccctgtgaattcaaaaaatctacctcctgaatatgatactcatggaaggattttgaaaaatgtttcagaattaatcatcagtaatctaaatcctgcaagaaagagacttagtgagtataatggatatgggaaatcactcctgagtactaaacaagagactactcatcctgaagtcaaatcccataatcaaagtgccagagctttcagtcataatgaagttcttatgcagtatcagaaaacggaaactccagcacagtcatttggatataatgactgtgagaaatcattccttcaaaggggaggcctgattacacatagtagaccttacaaaggagaaaacccatctgtatataataaaaaaagaagagcaaccaatattgaaaaaaaacatacatgcaatgaatgtgggaaatctttctgcaggaaatcagtattgattctgcatcagggaattcactcagaagaaaaaccctatcaatgtcatcaatgtggaaatgcatttagaaggaaatcatatctcattgatcatcagagaactcacacaggagagaaaccctttgtttgcaatgaatgtggtaagtccttccgcctcaagacagccctcactgatcatcagagaacacacacaggggagaaatcgtatgaatgtctgcaatgtaggaatgccttcagattgaagtcacacctcattcgtcatcagagaactcacacgggagagaaaccatatgagtgtaatgactgtgggaagtccttccgccagaagacaacactctctctacatcagagaatccatacaggtgagaaaccctacatttgtaaagaatgtgggaagtcctttcaccagaaggcaaatcttactgtacatcagagaactcatacaggggaaaagccctatatttgtaatgaatgtgggaaatccttctcccagaagacaacccttgctcttcatgagaaaactcataatgaggagaaaccctatatttgtagtgaatgtggaaagtccttccgccagaagacaacccttgtagcacatcagagaacacatacaggggagaaatcttatgaatgtcctcactgtgggaaggcctttagaatgaagtcatacctcattgatcatcaccgaactcacacaggagagaaaccatatgaatgtaatgaatgtggtaaatcattcagtcaaaagacaaatctcaatctacatcagagaattcatacaggggagaaaccctatgtttgtaatgaatgtgggaagtcctttcgccagaaagcaaccctcactgtacatcagaaaatacataccggccagaaatcctatgaatgtcctcagtgtgggaaagcctttagcaggaagtcatatctcattcatcatcaaagaactcatacgggagagaaaccatataaatgtagtgaatgtggaaagtgcttccgccagaagacaaatcttattgtacatcagagaactcacacaggtgagaaaccctatgtttgtaatgagtgtggtaagtctttcagttataagagaaacctcattgtccatcaaagaactcacaagggagaaaacattgaaatgcaataaatgatgtggtttcttatatgaattctttacaagctgttgtaaacatttagttttaaaaagaaaagcatgctgaaacatgttaatgtaattttaaatcacaagtctaataattattaaagtaccatacggaataactgtctactgtttactagcatataaaataagtatgatcattattattgaactctatcagctatgaagctaaattttaaagtcaactgctcttcctactgactcaaatagtttattttttaaaaatacttatataatacatgcagagacaagatacacaatgattataagtattaatctccataagagaaaatatttatgaactatatttctcattgcactctgtaataaaaagcagttagttgttacttacctaagagttaccacttccgtagcctataacatcaaaacgtagtttttgcatgttttcaattttataaatatatattttatcagacatcatgaattattttgtgtcttgcttatttcactcaattttttaagatctgtacattattgcatgtggcagtagtgtattttcattttgcatactattccattttaagaatatattgctgtttatcctattgatggatatttgtattttttatacttttgtgtaataataaaaatactgctgtaaatattcttgtttatatcatgtgtgtgtttgcgtgtatgtatttctgttgaatttatacctgggactggacttattcattccaagagtatatatgaggtttttttggtcattcagactggagaatttctactaaaaagaaaccttgcggctttataattgtgagaaggctattaataaatcatggacatgtgaatgcagtatatgtagaaggcctttagctgtctctcaatgcttaaatgcaaaacaagcaaattcgtattggagggaaatcttgtagttgtcatgattttaggggtactttagccatagcttattacaccttatttaatatcaaggaattagaattcatacaagagaaagggacattgagaagggaaataggtgaggaaaatttgagagtaccagagtctttttttttttcttttttttttttttttttgagacagagtctcgctctgttgcccaggctggaatgcagtggagcgatctcggctcactgcaacctctgcctcctgggttcaagtgcttctcctgcctcagccttctgagtagctgggattacaggcatgtgccatcacgcccagctaatttttgtatttttagtagagacggggtttcaccacgttggtcagactggtctcgaactcctgacttcatgatccgcctgcctcggcctcccaaagtgctgggattacagggtgacccaccacgcctggctacaacataagccttttctaccataatctataagaaatgtaagtctctgaaaatcccaaataagtgactagagagattttgatgtttgagaattggaaatctgcgaagacagtgacttccacggtatccttttggcgaggagagtaagctcagtggcaacttgaacagcattattgcaggtccttcttgggaaggattacttataaccagtatttactatgtatatgaagtcattgtaataaaattcagtagaaattgaaatttattaattaatttattttttgaaatggagtctctatcgtccaggctggagtgcaatgacatggtctcaactcactgtaacctctgcctcctgggttcaaacgattctcctacctcagcctcccaagtagctggtactacaggcacgtgccaccacacgcagctaatttttgtatttttagtagagacagggtttc[142 bp omitted]ctgcataaacagaaagatggttcagggttcaaatatttgacattaaatatattaaacagaccctctggcctgttagagagggacagccattgccaatcagtagtaaatggaaccattcttgtcaatccttatttttctgataatttcatagcaaaaaatgaacagggcaatgagacaaaagcataaaaatttagacttgatagtagcacacagaaaacacacgtgtgtgtatgtgtgtatatatgtaaaatgccttgtctataatgactagacatgtcattaaatttagccttaataatttatatatgcataaagattttttaaagtatacatttttaaagaatataaagaattattaataggtttaataaacctattaaagtaactaaaacaggtaattataggacttataatcagaactgtgagaacccaaggattttgtcattgtgaatttataggggagttatatactagtatatgctaacagtggtgactaacagaagaattgtactcatgaccaaagatggaagcctaccttgtttttctaggtggagaggatggcctaactggatgtttatcctagcgtcaacccaccaaagatttggggaacatgtgagtcacattctctgggacattctactcccctttgattttgcatttccagacatttcagtggctaccacaaaaaataaaaagtatctgtggcatcactgcatgtgctgccctgtctcctgatttactgattatcatgaaatagccatgtactgtttcagtagaacattgtatccaatgtccactttattttcaaacatactacatatattcatgttttatagctcttgaatatgaagaactagaaagtatgagatattaacgggcagttttataaatggccaaactttgaaacttttgaggctgggcgtggtgtctcacacctgtaatcccagcactttgggaggccaaggtgggcagatcacctaaggccaggagtttgagaccagcctggccaagagtgaaaccccctctctactaaaaatacaaaaattagccaggtgtggtggcgcattcctgtaatcccagctactcgggggcctaaggcaggagaatcacttgaacccagtaggtggaggttgcagtgagccaagatgatgccattgcacgcctgcctggccaagagagtgagactgtgtctcaaaaagaaaatataatcatgaatataatcattattatttgtataataattattgggcatctttccataatcatgctcataactttcagttttaacatgttctttgtatgaaaaactgatgagtttcttatgaaactgtctatggctgtatcatatggcaattctgtatttctttttttttttttttttttttgagacagtttcactcttattgcccaggctggagtgcaatggtgcgatctcggctcaccacaacctctgcctcctgggttcaagcgattctcccagctcagtctcccgagtagctgggattacaggcatgttcccccatgcctggctaattttgtatttttagtagagatagggtttctccatg[139 bp omitted]ggcttcactattttacattaccaatggcaatgcaaaaaggttcagatttctcaggccaggtgtggtggctcatgcctgtaatcccagcactttcagaggctgaggcagtctgatcaattgaggtcagaagttcaagaccagtctggccaacatggcgaaaccccatctctactaaaaatacaataattagcaggcatggtggcgtgtgcctgtaatcccagctactctggaggctgaagcaggagaattgtttgaaccaggcaggtggacattgtagtgagccgagatcacgccactgcactccagcctgcgcgaaaaagcgagacttcatctcaaaaaaaaaaaaaaaaattagctgagcttggtggtggggttctataatcccagctacttgggaggctgaggcaggggaatagcttaaacctgggaggcagaggttgcagtgagctgtgattgtgccactgcactccagcctgagtgacagagtaagactccgtctcaaaaaattaaaaaaaaaaaaaagttcacattcctccatattctttccatcacttattttccttcaaaaaattttttgaattaaaaccttttttgtgggtgtcaagtatctcattgagattttgatttgtgtttctgtaatgattaatgtaggtttctttcattcttgaacatagtttgctgaaaataggatttgggattgagagttgttcctttcagcacttgaaaaatgtcacttctttctggtcttcatggtttctcataagaaatctgctattttaatttttttcctctaaaaatatggtatttctgtcttactactttcaagatttttattttttgtctttaattttatttaattttattttatttttgagatggagtttcactcttgttgcccaggctggagtacagtggtgtgatctcggctcactgcaacctccacctcccagtttcaagcgactctcctgtctcagtctctcaagtagctgggattacaggtgcatgccaccacacccggctaattttggtatttttagtagaagcggggtttcaccctattggccaggctggtctcaaactcctgacctcaggtgatccacctgcctcggcctcccaaagtgctgggatcacaggtgtaagccactgcacccggccttgtctttaattttcgcaagttgggtacaatgtgttacggtgttacgttttggggatgggaagaaagttatcttgtttaaattcactcagcttcttgaatctgtcttttgccaaatttggtgagttcttagcaattactactttaagtcctttgtagtaggggagaggggatgtcttgctctctcacccagtctggagtgcagtggcatgatcacagctcactgcagcctcgacctcctggatttaagcgatcctcccacctcagcttcctgagtagctgggactacaggaatgcaccaagaggcctggctaacttctatattttttacagagatggtatcaccgtgttgtccaggcttccttaagtactttttcagccctgtcttctttttcctctccttccaggatttcaagggcatgaatgttaatcttgtgttacattctcacagttcttcattcttttcatgttatttttttcagtgtactatctctctcttgttcagattgggtagttcctattgttctgtactgcagttcactgattgctctgtctcctctgtttccactctttgtccctccatttgagtttattttagttatattttcaattctatactatttggttattttgtatgtcttctaatttcttgtctggactaattctttgttgagatattgtatctcatttgtttcaagtgtgtgattgttcaggcatttttatgatgtctgcttcatgtatttatcatataattctgacatcattgtcattttcatgctcgtcttttttcatttgagattttcctggttacaattattgaatttccattgaaatgtgcaattttatctattatgagattgtagatcttatttaaacctgttttagctggctttttgataccaccctggcatggggagggcaactgtgccattttgctgtgccacatagggggtgagaatccagatttcccactcaccttctactgacacctgggtggaagtgctcctcctcacggttaggtgtgactgaggagttctggctccctattagtcacctttttatacctctcttataccccagtaagagagacagcggtgccttgttaatgatttccatttgccttccatatacaccacagaggcagggctggccctgttaggcgggatagtagtgaagatcctgactttactatgcctactccgacactggcccagcaggtagtttaacaagtatctttttactgctgcatatgggaatggaaatccagattccccaaatgactccaggggccctacgtaattccatctgcagttatagtcctggctcccttcacagtcttcctgaaaccatcctggcagggaggtcagagtatcttgttacagtctactgagagtagaagtctaggttccctactcagcctttgcaaggtgcatgagtggagtggcatcaggtgttttgagtttctttctttctttctttctttttctttctttctttctttctttctttcctttttttttttcctgtgctttttcgttagagtagatcaattttatttatttatttatttatttatttatttattttttgagatggagtctcacttcttcacccaggctggagtacaatggtgcgatctcggctgactgcaacctctgcctcccgggttcaagcaattctcctgcctcagcctcccaagtagctgggattacaggtacgtgccaccacacccggctaattttgtatttttagtagagaaggggtttccta[131 bp omitted]cggagtctcggtctatcacccaggctggaatgcagtggcgtgatctcaactcactgcaagctccacctcctgggttcatgccattctcctgcctcagcctcccgagtagctgggactacaggcacccattaccatgcccggctaaatttttgtatttttagtagagatggggtttcactgtgttagccaggatggtctcgatctcctgacctcatgatccgcctgcctcggcctcccaaagtactgggattacaggtgtgaaccaccgcgcccggccttgcaattcttatctagacgttttgtcttgctcgggtgcccttttcttggtctgtttctacacagagcatccttttattaggacttttttttctttttgagatggagtcttgcactatcaccaggctggagtgcagtggcacaatctcggctcaccacaacctccacctcccaggttcaagcaattcttctgcctcagcctcccaagtatgggattacaggcatgcaccaccacacccggctaattttgtatttttagtagagacggggtttctctatgttggtcaggctggtcttgaactcccgacttcgtgacctgcccgcctcggcctcccaaagtactgggtttacaggcatgagccaccgctcctggcctgttttgtttgtttgtttgtttgttttttgtttttttctttgggccaataatagataaaccaatgccatgtgcctcctaatgacatgcactgagaaggatacatcattgctgtaatggtatttctgtttaaaatgtataacctgtatctaaaatgaggaaacatcagataaatccaaattgaggttattgagaacaatgattctaattaaatagtatgaaatagagaaaacgtaagtaaatactctatattcctgaattttaattggtgggagtatcactttgaccagtccagcagcaatacacatcactagcacatacattatggtatttatggaccatttcctgctaaaagaaaccaggatttcttgggagaagtggctgattccaagtatgggcagaaaatttttaatgagcctgcagtattttctcataccagataataacaaagctaatttaaaaaatcagtagattaatgacaaagcactgccaacttggaaaggtttccaatgaccaaggataggacaaatcaagcttaaatataaaaataatttatatttgaaacacaccaaatacatttatagttgaataaatataaatctacatttatagttgaataaatataaatctacatttatagttgaataaatataaatctacatttatagttgaataaatataaatctacatttatagttgaataaatataaatctacatttatagttgaataaatataaatctacatttatagttgaataaatataaatctacatttatagttgaataaatataaatctacatttatagttgaataaatataaatctacatttatagttgaataaatataaatctacatttatagttgaataaatataaatctacatttatagttgaataaatataaatctatatttatagttgaataaatataaatttacatttatagttgaataaatataaatttacatttatatttataaaaatttatatttgaaacaccaaatacatttaaattcccaaatttatagcaataccaaagaatcagtgatcacagaacaataaggagcaaagttattatcttaaaaactggtatctaaaaggaaaaaatatatcttggttatcctatgtgaacaataccagtggggggtatccaagtagcatcagtgggcagcttctctttgtgaagtattccagctaatgtatttcaaaattttttcttctggaaataatgtatttgtgtcatacttggtctccaaacctgaaaaaagcaagaaaacagatgttttcctgtaccaggaaaaaaacccaaaaccttggagataagtgatgaattgaaaataaggtacactagaaatatatttcaataatgtttttacacaacttgaaggaggcaaagagagtttagagaataatgaaagaggatgtggtgagggtggtgataaagcaaataggttgtcatcagctctaagatttaagtgttcgaagactactggttccaaatgatggagcagaagaaaactggcttcactgcccaccaacagaaaaccaaaaacaagtgtgcatcaccaagattatcaccaacaatattctagaactcaaatatgaagatgagtcagttctggagctacaaagaagtgaaaaatctctgagcagtggtaggagaatcagacttccacatccatgacacctcttcccccattctgcctggcaccaaacatagaaaatttcccctcaactcatggtttctgtagtggaaaaagtgagattgaggtgcaccaccagcttccccaccatcttgggtgtcctggccttgccttaacccatgggaaactctggtttgtaacttggccagaggagatgcaaaatcagtgtggttaggccaggcgtggtggctcacgcctgtactcccagcactttgggaggccaaggtgggcggatcaggagatcgagaccatcctggctaacacggtgaaaccccgtctctactaaaaatacaaaaaattagccaggcgtggtggcgggcacctgtagtcctagctactcgggaggctgaggcaggaaaatggcgtgaacccgggaggcggagctttcagtgagccgagatcatgccactgcactccagcctgggagacaaagcaagactctgtctcaaaaaaaaaaaaaaaaaaaaaaaaaaaagatatataagagctttatcctctaagcccaacatgtagatcttgtttaaactcagtgtggctgttcagcagcagcatgctgtaggaggttcattccacagatctcttgggcacaaacccctagccagccctcccacacggccagaataccctctttgggacctaccccattaaggaagtgaattgctccaaccgttactaaagctaaggcgaaccaggttttaaggcaccacctagagctgaaaaggaggcagcaacctcatgataaaaaaacctctaagccaatatgtccagtaaaaattgtagg[140 bp omitted]gggtgtggtggcgggcgcctgtagtcccagctacttggaggctgaggcaggagaatggcgtgaatcgggaggcggagcttgcagtgagccgagatcgcgccactgctctccagcgtgggtgacagagcgagactccgtatcaaaaaaaaaaaaaaaattgtaacaagccagtcagagaacattggaataaataaataatacttcaatgcaaagacatcaatgtacatccataagcaacatgcctaaagagggaaccatgatctcaccaaatgaacaaagcaagaaaccagtaactaactcatcctaacaagatggcaatatgtgagctgtctgataaaaattgaaaatagcagttctaaagaaacttagtgatttccgagataagactgaaaagcaattcagaaatgtatcaaagaaatttaacaaagaaattgaaaaaaataaaaaaacggaaatcaaatcttgcaactaaaaaatgaaatttctaaacagaattcattataggctctcaatggcagaatgggtccaatagaagaaagaatccatgagctccaaaataagttatttgaaaacacaaagtcagaggggaaaaaaaagaacacagaatgaaaaggaacaaagatcatctacaagatgtagaacattacctcaatagaccaaatttaagaatcattgatgttgaggaaagagttgaataagagacaggggtacaaagattatttttaaaaatattaataactttccagtcttctttggaaagaaaactttccaaaacttgagaaagatatacatttccaggtacaggaaggtcagagaacaacaaacagagttgacccaaatatgattaccccaagtcatataataaactctcaaaggtcaaggaaaaagagaggatcctgaaagcagtaagagaaaataaacaaatggcatttaaaggagctctaattcatctggcaacagacttatcaatggaaaccatacaggacaggagggagtcaaatgacattttagaagtgccataagaataaacattgccatccaagaataccctatccagcaaagttagctttcaaatatgaaagagaaagtttttcccagacaaacaaatgctaagagaattcaccaccaccatacccctgttacaagaaacgctaaagggaatttttgttttttcttttttgtccttttcttttttattttttgagacagggtctcactttgtcacccaggctggagtgtagtggtgcgatcttggctcactgcagcctcaacttcccaggttcaagcaatcctcccacctcagcctctcaagcagctgggactacaggtgtgtgccaccatgtccagctaattttggtattttttttatagagatggggttttgccatgttgcacaggttggtctcaaactcctgagctcaagtatctgccctccttggcctcccaaagtgctaggtttacaggcatgagccactgcacacagcctaggagtttttcaatctgaaagaaagaacattaatgtgcaaaaagttttttcaaagaaggtacaaaacccaccagtaaaattaagtaaacagacaaacccaggatactctactactataaatgtgtgtaattcacttataactctagcatgaagcccaaaagacatatctatcaaaaacaataatggccacagcaacctcttaagagagaggtaatataaacatatgtaaatttggagaactaaaagtaaaaatatggggggaaagggttaaagtgtggaaaattttttccatttttctttatttctattcttttatttgtgatctaagataggttggcacctctttaaagtaatttactgtatctatactatgttttttgtaagcctcatagtaaccacaaagcaaaaacctatgaaagagtcactaaaaataaaaagcaatgaattaaaacaccttaccagagaaaaatcgcttaattacaaagggacacaggaaagaagaaaggaggagaggagtaaaacaggcaacaaaatggcacttttaagtacttatttatcaaaaataatactaaatgtaaatgaactcaattccccagttaaaggcatacagtggctgaatgaataaagataaaacacaactatatgctgctgccaagaaacccacttcacctataaaaatatgcacagattgaaagtgaagacatggaaaaagataccccatgcaactggaaactagaaaagagcagaagtagctatagttttatgaagtaaaatagactataaatcaaagacaaaaaagagacaaagatggtcactatataatgattaaggggtcaattcagaaacagaatataacaattacaaatatatttgcacacaacactggagctcccatgtatataaaggaaacaatatagctaaagggagagatggactacaatataataatattaggagatttaacacaccattttcagtaatggacatatcatccagagagaaaatcaacaaatattagaggtaaactacacactagacctaataggcctgatatttacagagcatttcacccaactgctggagaatacacattcttttcattagtacatggcatattctccagaatagaccatatcttcgaccacaaaacaagtctaaacaaatgtttaaaagtagaaatcatatccagtatcttttctgaccacaatggaataaaactagaaataaataacaagaggaacttcaaacacttcataaacacatagaaattaaacaacatattaatgaatgaccaatggatcagtgaagaaattaagaaggaaatttaaggccagacacagtggctcatgcctgtaatctcactactttgggatgctaggcaggaggaaggcttgagtccaggagtttgagaccagcctgtgcaacatagaccttgtccctactaaaaattaaaaaattgactgagcatgtggcatatgcttatagtcccagctacttgggagcctgaggcaggaggacgcttaagctgaggaggttgaggttgcagtgagctatgatcataccactgcactgggcaacagagcaagaacatatcccaacaaaaaaaggaaattttaaaatatcttgaaacatatgaaaatggaaatataccaaaatatatgggacacagcaaaagcagtattaagaaggaagtttatagaaatacatgtctatatcagaaaactagaaacacttcaaataaacaatctaatgatacacctcaaggaactagaaaagcaagaacaaaccaaacccaaaacagtagaaggaaagaaataataaagatttgagcagaaataaatgaaattgaggctaaaacaacaacaacaacaaaaacaggctaggcacggtggttcacacctagaatctcagcactttgagtggctgcagcaggtggatcacttgatgctaggagttcaagaccagcctgggcaacaaagtgagacccccatctctacaaaataaaataaaaaattttactcaggcacagtggcaagtgcctatactcccagctacttaggaggctaaaggcaggaggacagcttgaccccatgagttcagagggtgcaacaagctttgattgtgtgactgcactctagactgggcaacagagtgagaccctatctctaaaaaaacagaaaaggccaggagcagtagctcacgcctgtaatcccaacactttgggaggctgaggcgggcagataacctgaggtcgggagttcaagaccagcctgaccaacatggagaaaccctgtctctactaaaaatatgaaaattagctgggtgttgtggcacatgcctgtaatcccagctacttgggaggctgaggcaggagaattgctcgaatgccagaggcagaggttggggtgagctgatatcgcgccattgtactccagcctggggaacaagagcaaaactccatctaaaaaaagaaagaaaaaagaaaatgcagtagatcagtgaaataaaaagttgattctttgaaaagataaagtcaacaaacctttaggtagactaagaagaaaaaaaagatccaagtaaataaaatcagaaatgaagaaggttgttgggcatggtggcttatatctgtaatcccagcactttgggaggccaaggcaagaggagcacctgagcctaggcaatgcagtaagaccccatctctacaaaattagtcccatctctaaaaaattagccaggcatggtggtgcacgcctatagttccagctacttgggaggctgagtcgagaggatccttccagcccaggagttcaagactgcagtgagctatgattgtgccaccgcactccagcctgggccacagagggagagatccagtttgtttttcttaataaaaggacacataataacagaccacaaagaatcatcagagacaatcatgaacaactatatggcaacaagttggaaaacccagaagaaatggataaactcttggagacataccacagattgaagccataataaaatgtctaccattgaagaaaagcccaggaccttatggcttcactgctgaatcaaacatttaaagaagaactagtaccaattctactgaaactcttcacaaaaattgaagaggagggccagcataactctgataccaaaatcagacatgagtacaacaaagaaagaaaacgacatcttcactgatgaagaaagatgcaaaaatccttaagaaaataata[133 bp omitted]tcaacatggtgaaaccttgtctctactaaaaaacaaaaaaattagctgggcacggtggcatgtacctgtaatcctagctgctggggaggctgaggcaggagaatcacttgaacctggaaggcagaggttgcagtgagctgagatcgtgccactgcactccagcctggggaacagagcaagactctgtctcaaaaaaaaaaaaaaaaaaaaaaaaatcattcaccttgatcaaatgaaattcatcccagggatgcaaggatggctcaacatacacaaatcaataaatgtggtacatcacattcacagaatcaaaaagaaaaaccacatgattatttgaatagatgctgaaaaagcatttgataaaattcaacatccgtttatgataaaaaccctcatcaaagtgggtatagaaggaacatacctctagataataaaggccatatatgacagacttacagctaacattgtactgagtggggaaaaattaaaggtatagtagggagaccccatgaaactattgctatggaataaaagatgaaatgctcctgattattgtaaatacaaagttgcatgcaggattgtgtaaaaacaatgccaagttggactgccagaatgagccaacagcacgtgatgtgctttcctctgcagagagcctataaacggacgtgcagtcagggaggtttcacatcaccaagattcctatcccagaaaagcagatgttcatagctctgggaatggaatgcgacccttgtggagagcctataaatggacgcatgggggcgcctgttcatatggataagatagggctataaacgccctcatcttgccacagctcttctaggtctctttagggttaaggcatactcccttctgagaatttctggtctaaccggttgtctggcttcacgtcctgtttctatggattgtttgtaaccagcttttgctgcaactgttactgctgattaatatcttgctaatcataggttatggagactgcgtttctgttttaaggctctgttagaaattactgatgcacactattgtaaattcttatctctgtatactgtacttctgcatacagatgttatgttaaagaattacttcatccccatgtgaccatctcacctcataatcaaatgaccctaaatccctcactaacctacccccgccctcattaaacttagtaataaatgctggtatatccagtgcattgttggcaccgcgggaccagaaggtggtgacccccctggacccagctttcactatcttgtgtgtgtctattatttctcaacctgccgatccgcctgggaacaaagagagagccccgttgcattgcaggctactggccagatcccgcaataaggtatgttctctaagatctgaaacaagatagaaatgctcacctttaccacctttattcaacatagtgctggaaatcctggcaagagcaattaagcaagaaaaaaaagggcgtccaaattgaaaaagaagtcaaattctgcagaagacatgatcttatatacttaataacctaaagactccaccaaaaaaccgttagaactgaaaaatgaattcagtaatgttgcaggatacaaaatcaacatatcaaaatcataacatttaatatacactaacagcaaataacctgaaaaaagaaatcaaggaaagcaatcacacttaagaagctacaaagaatagaaaatagctacaaagtatagaaaatacctaggaatcaagttaaccaaagaagtgaaagatgtatatgaggaaaactatgaaaaactgatgaaagaagtagaagatgacacacaaaaaaggggaagatattccatgctcatggattagaataattaaaatgacaatactactcaaagcaatttatagattcaatatgatctctatcaaaatgccaatgacattcttcatagaaataggaaaaaaatcctaaaatgtatgtagaaccacaaaagaccctgagtagccaaaggaattctgagcaaaaagaacaaagctggagacatcatattacctgacttaaattttctacaaacctatagtaaccaaatcagcatagtactggcataaaaacagacacagaccaatgtcatagactagagaacccaaatatcaatccatacatttacaaccaaataatctttgacaaaggtgccaagaatatacaatggggaaaggaacgtttttttcataaatggtgctgggaaatttggataattacatgcagaagaatgaaactagacctctatctttaccatacacaaaaatcaagtcaaaatgtaagacctgctactagaagaaaatattggggaaacactcacagacattggtctacacaaagacttttttatataagaccataaaagcacaggcaacaaaagcaagactccaccaaaaaactgttagaactgaaaaatgaattcagtcagacaactgagattacatcaaaataaagtttctgtgcagcaaaggaaacaatcaataacatgaagagaccacccacaagacgggagaaaatatttgcaaacaacccatctgacaggggattagtattctcttatataattatatatatgagaatatataagaacatataaggagctcagacaactcaatagcaaaaaaaaaaaaaacccaattaaaaaaaatgggcaaaagatctgaacagacatttctcaaaagaagacatacaaatggccaatgggtatatgaaaaaaatctcaatatcactaatcatcagagaaatgcaaatcaaaactacaaagagatatcatctcaccccaattaggacagctattatcagaaggacaaaaaaataacaaatgctggcaaggacgcaaagaaaagggaacccttatatgctgttggtaggaatataaactagtatagctactatggaaaacagtttggaggtccctcaaaaaactaaaaatagaactatcatatgatccagcaatcccactgctgggcatatacccaaaagaaaggaaatcagtatatcaaaaagacaactgcactccatgtttgctgcagcactgtccacaatagccaagatttggaagcaacctcagtgtccatcagcagatgaatggataaagaaaatgtagtttgtgtacatgagggaataatattcagccataaaaaaagaatgagatcctgtcatttgcaacaacatggatggaatttgagatcattatgttaagtgaagtaagccaggcacagaatggcaaacatcacaggttctcacttatttgtggaatctgaaaatcagaacaattgaactcacagacagacagagtagaaggatggttaatggaggctgagaaaagtcatgggggaagtgatgagggttaatgggtaaaaaaagaatgaataagacctactatttgataacacaacggggtgactatactcaataataaagtaattttacatttaaaaatacctaaaagagtataattggattatttgtaacacaaaagataaatgcctgagaggatggataccccattctccatgatgtgattattatgcactgcattcctgtatcaaaacatctcatataccctataaatatatacacttactatgtacccacaaaagttacaaattaaaaaaaattaaaaaagattttaaggccgggcacggtggctcatgcctgtaatcccagcactttgggaggccaaggcaggtgtatcacctgaggtcaggagtttgagaccagctttaccaacatggcgaaacctcgtctctactaaaaatacaaaaaattagctgggcatggtggtgtgtgcctgtaatcccagccacttgggaggctgaggcaagagaatcgcttgaacctgggtagcggaggttgcagtgagctgagatgttgccattgcactccagcctgggcaacagagcaacactctgtctcaaaaaaaagaaaagaaaaaagatttaaaaaaaccacagccaaatagcaagaaggagtatactgaatattcccaacaacaaaaaagatgtttgaagtggtggttatactattaataattaccctgatctgctgactatatgttatgtgtaccaaaacatcactatgttccccacaaatgcgtacaatttttctatgtcaatttcaaaaataaaatatttgtgaaaaaaaagaacatgataaggccaggtgtggtggctcactcacgcctgtaatcccagcactttaggagactgaggcaggtggatcacttgagctcaggagttcaagaccagcctgggcaacatgatgaaaccctgtgtctacaaaaaattagcaggatacagtggcacatgcctgtagtcccagctacttgggaggctaaagcaggagaattgcttgagcccgggaggcagaggttgcagtgagccaagatcatgccactgcacttcagagcctgggtgacagagtaacactccccccactgccaccccccaaaaaagaacataatacataaagaatacatgtatattatagacattagagcaaatcctaaaaaatataaaaacaaagaggtataactaataaaccatagtagagataaaatggaatcataaaaaacaattgtaaagaagaaaggaaaaggccaggcatggtggctcacgcctgtaatcccggcactttgagaggctgaggcaggcagatcatgaggtcaggatatcaagaccatcctggccaacatggtgaaaccccatccctactaaaaatacaaaaaattagctggccatggttgcgtgcacctgtaatcccatcttgggaggctgaggcaggagaattgcttgaaaccgggagttggaggttgaagtgaggcgagatcaccccactgcactccagcctggtgacaaagcaagattccacctcaaaaaaaaaaaaaaaaaaaaaaaaaagaaggaacaaacaacagttaggacaaaacaaatggcaagctagtggaactaaatctaaccatactgatacttacttgagatgttaataatctaaaccagggatcagaaaactttatcaataaagggccagagtgtaaatacaagttttctggacccacagagtctctgtcaaatcattcaaccccttagttgtagcagaaaagcaatttaaaacatgtaaacaaatgagcatttgttgtattccaacaaagctttatatataaaacaggtgacaggctggatttatcctgggaaccatagtttgccattccctgacctaaacactccaactaaagacagagattgtcagattgtataaaaatgtaagaacacagccaggcctcatggcacgtgcctgtagtgctagctactggggaggctgaggcacaaggattgcttgagcccaggaggttgaggcagcagtgagttgtgactgcaccactgctgtccagcctcggtgacagagcaaaaccgtgtctcaaaacaacaacaataacagcaaaacaccaaactaaaactatacattgtctacaagacacccactttaaatttaaacacctagatagtttaaaagtaaaaaaaatgatgggaagagctataccatgcaaccaccaatcatggctatattaatatcagacaaagtagacttcagaataaggactgttacaaggaacaaagagggaattttataatgataaatgggaaaaacaatcctgaatgtgtaagtacatgataacagagctccaaaatgcacagattaaaaacagataaaactgaaaaagatatagagaaatacacaattatagttagatatttcaacactcccctatcactgatagaacaagtagacacaagactaattttaaaaggagaaatattctgtgattccacttttgtgaggtacttagaacattcacatttatacatacaggaaatagaacagtagtcaccagaggttaggagattggggaaatgggaagtgttgttagaaaggcttacagtttcacttttacaaaatgaaaagggttctggagatggacgttggttgtacattatgaatgtacttagtactgactgtacacttaaaaatagttaagatggttaattttatatgtattttacaataaaaattttgaacaaaatattaattggttttttgagaagatcaataaaattgataaacctctaagcagactgatcgaaagagagagagaacacacaaattgccaatgtcagaagtgaaagtgtggacatcaaaactacaggctgggtgcagtggctcatgcctgtaatcccagcactttggagggccgaggcgggtggatcacctgagatcaggagtttgagaccagcctggccaacatggtgaaaccccgtctctaaagtacaaaattagctgggcatggtggcacttacttgtaatcccagctacttgggaggctgaggcaggagaatcgcttgaaaccaagaggcagaggttgcagtaagctgagattgtgccattgcactccagcctggaaaacgagagtgaaactccgcctcaaaaacaaaaacaaaacctacagttataaaaagcagatctggctgggcgtggcagctcacgcttgtaatcccagcactttcagaggccgaagcaggcagatcaccggaggttgggagttccagaccagcctgaccaacatggagaaaacccatctctgttaaaaatacaaaattagccaggtgtggtggcgcatgcctgtaatcccagctacttgggaggctgaggcaggagaatcacttgaacctgggaggcggaggttgcggtaagccaagttcgcgccattgcactctaccctgggcaacaagaccaaaattccatctcaaaaaaaaaaaaaaaagaagaagcagatctgcagttgaagcaagctgtgaataagcagggagggaaggaccgactgcaaagggacatgaggggactttttgggatgatggaaacatcctctatgattgtgatggtagctaaacaaataccgatatcaacattaatcaagttgttcatttcaaagtatgaattgtaatctatgtaaattatacctcaaccaacttaacaaaaatataacaagtcttgaggtcttgtctttgaatagtggaagatacaatctctggctaaatataggcccaagtggttttatttatagcttgacatagttcctttattaaaatttgtttttgttttttgagacagtcttgctctgtcacccaggctggagtgcagtggcgagatcttggttcactgcaacctccacctcctgggttcaagcgattctcctgcctcagcatcccaagtagctgggattacaggcgcccaccaccatgtctggctaatttttgtatttttagtagaggtggggtttcaccatggtggccaggctgttcttgaactcctgatctcaaatggtccacccacctcggcttcccaaagtgctgggattacaggtgtgagccaccatgcccagctaaaaattgttttaattaacaaaaccataaacgtacagcaatcatccttaatggcgaacattaaaaatatttccttggccaggaacaatggctcacacctgtaatcccagcacttcaggaggccaaggacggcagatggcttgagcccagaagttcgacagtggcctcgacaacacggcaaaaccccatctctgcaaatacaaaaatgagccgggcatggcagtgcacacctgtagtcccaggtacttgggaggctgaggtggaaggactgattgagcctgggaggttggggctgcagtgagcagtgatcatgccactgccctcaagcctggtgacagagtgagaccctgtctcaaaaaaaaaaaacaccaaaaaaaaaaaaaacctcacttaaagaaagggtcaagtgaggaaactagttagtgctgtagacattcatattacacatatgatccaagctacaagtataaattaagaaataaggcatatagaaaggaataggcaaatacttttatttacaaataataccaacatctctttagacaattcaatctcatgaagaaaccatttcatctactaaagtagttcatcaatgttacaatccttagacaaaaaccaacagtttagtacatagtaatagtaatcaattacacaacagaaaaaatatcccaatcatattataaacaaaagccattaagtatctagaaataagtaaaacaagaaatgtgtacacttttatgctaaaaatataaagacttactaaagcacataaaagaatacctactgaaataaagacacaccaggtacaagagaaaaactcaatgtcgtaaagatgtcaataatgattcttttctttctaatactatggcagaggagaaatattgaaactcctctattaaaaggatttaccggccgggcacgtggatcctgcctgtaatcccagcactttgggaggccgaggcagtcagatcacctgaggtctggagttcaagcccagcctcaacatggagaaaccctgtctctattaaaaatacaaaattagccgggcgtggtggtgcatgcctgtaatcccagctactcaggaggctgaggcaggagaattgtttaaacctgggaggcagaggttgcggtaagccgagatcgtgccattgcactccagcctgggcaacaatagcaaaactcccgtctcaaaaaaaaaaaaaaggatttaccccaaatagatcatctttggtcaataagaatatacaggtgatctttctgtcttcattgtgcttttctctgctctttaaaaaattctacttttttcataaaaagagttaatttttaaaagtgaaaagtaaaaacgttaagagtattggctgaacacagtggctcacacctgtaatcccagcacctaggaggctgaggtgctaggaccaattgagcccaagagttcaagaccagcctggacaacatggtgaaaccctgtctctacaaaagatacaaaaattagctaggtgtggtggtgtgcgcctgtagtccttgctactcgggaggctgaggtgggggatcgattgagcccgggaagttgaggctgcagtgagccaagattgtggcattgcactccagcctgggcaacacagcaaaaacctgtcacacatgaaaaagacaactgtgaactgtaaaaagcactcctccatcttcaccctctctgtatatatttatgtttaaatatctccaaggaagcagttacaaaaacatggagaataataaatgacagagtaagaatttgagaacaaacatttgatttgtttccataaattgagaca[137 bp omitted]tggtgaaattccgtctctactacaaatacaaaaaattagccaggcgtggtggcgggcacctgtagtcacagctactagggaggctgaggcaggagaatggcgtgaacctgggaggtggagcttgcagtgagtcgagatcacgccactgcactccagcctgggcgacagaacgagactgtctcaaaaaaaatcaattgagacaaagcctcaattgattaaccttaaaataaccttcttaaaagatatgtgtgtgtgtgtgtgtgtatataaatcatccataagcatattagtaaaagtacaaatcaacagatatgttttagagaagtgttaaattttttaaacgcaagtgtaatttaaatagaatgaaatacaacaatccgaagtgcatagacgatgaggtaagatttttttcatcaactttattgaagtgtaatttacatataataaaatgcaaccatatgtctacattcatgcaaataccaccttgtaagaaatgcctttcctgactaccttatctaaattagtcctgcccagagttcagagaccagcctgaccaacatggagaaaccccgtctctactaaataatacaaaaattagtcgggcatggtggagcatgcctgtaatcccagttactcaggaggctgagtcaagagaatcgcttgaacctgggaggcggaggttgcagtgagccaagatcgtgccattgcactccagcctgggcaacaagagcaaaactccatctcaaaaaaaaaaaaaagaaaaaagaaaaagaaagtcccaggtgcagtggctcatgattgtaatcccagcactttgagaggacaaggtgggccattctttatattcataaggtgggaagattgcttgaagacaggaattcaagaccagcctgggtaacaaagcaagactccaactctactgaaataaaaaataaaaacttagctgggtgtcatggtgctgctgggagtatagcagtgaggacgaccagaggtcactcttgtcaccatcttggatttggccgacttctttactgcaagatgttttctcagcaaggtctttatgacctgtatcttatgctgacctcatatctcatcttgtgacttagaatgacttatctgtctaggaatgcagtccagtaggtttcagtgttactttacacagctcctattcaagaagaagttgctctggtttacacgcctctgacgtaaccatgcagtgaacaagtctattggctccatttattcaccagcatgtgctcactttgtatctgtgtcatatttggatgatcccaacaatatttcaactttctcattgttgttatatctgttatggtggcctatgattatcttaggcaccactacttgttttagggcatcacaaactgtgtccatataagacagcaaacttaattgataaacatggtgtgtgttctgactacaaacttaattgataaacactgtgtgtgttctgactgctccactgactggctcactgcaacatccgcctcccaggttcaagcgattctccagccttgcctcctgaatagctgggattacaggcatatgccaccatgtctggctgattttgtatttttagtagagatggggtttcaacatgttggccaggctggtcttgaactcttaacctcaggtgatccacccacctcagcctccgaaagtgctggcattacaggcgtgagccaccacgcccggcttggaatttctaatataaattgcccactggatccaaaggagaaggtgcgcacagactttagttttgcttgctttctttccagcaaggactttcttagccacctttgcagttatgggctaaagtagacagggaaatagacagggaaggcgaagcttaaaacaaagtcagtagtcaaacatgaaaaatatagtcacacttatttattataaaaaaactattactagccaggcgtggtggctcacacctgtaatcccagcactttgggaggccgaggtagggggatcacgaggtcaaaagtttgagaccaccctgaccaacacagtgaaaccccgtctctactaaaaatacaaaaattagccaagcatggtggtgcatgcctgtaatctgagctactcaggaggcagaggcaggagaatcacttgaacccaggaggcagaggttgcagtgagccaagatagcaccactgcactccagcctgggcaacagagcaagactctgtctcaaaacaaaacaaacaaacaaaaaatacacaaaaacaactattgccatcaacattttatcaattagtaattttggcacagagaatttacataactagcctaatgtcacgtaggtagtaaatggttgtcttttgtcattgaccacattctctaatatgaatttgtataacttcaataagctttgaatcatgatagaaaactcatctacattcattatcaatttctttcagtattaaatgtcctaattttggtgggtggatcaccaggtcaggagatcgagaccatcctggctaacacagtgaaaccctgtctctactaaaaatacaaaaacaaaaaaattagccaggcgtggtggcaggtacctgtagtcccagctactagggaggctgaggcaggagaatggcatgaacccaggaggcagagcttgcagtgagccgagatagcgccactgcactccagcctgggcgacagagcaagactccgtctcaaaaaaaaaaaaaaaagtcgtaattctggaaaaagtgaatatgaagtaatacacatccattgtatttgacccacatatggaatctgctgatgatccatgacaaatggcatgagaacagtttcctacattaattatgttaggtcatgaattctctgatgtcgagtaagctgtgtaagctgtttaaaggccttcccacatgtcttacattcatagggtttctcgccagtgtgaacactctgatgtcggctgagtcctgaggcatagaaaaaggctttcccacattccggacattgataagttttctcaccagtatggattcgtttatgttgactaagttgtgaaggacatctaaaggccttcccacattccttacaatcataaggtttctcaccagtgtgagttcgctgatgtcgaattagttctgagccgcaagtaaaagatttcccacattctttacattcataaggtctgtcaccggtatgaattctctgatgtagagtaaggtgtgtacgctgtctgaaggacttcccacatgtcttacattcatagggtttctcgccagtgtgaatactgtgatgtttggtgagtcctgagaaacggacaaaggcttttccacattcatgacatcgataaggtttctcaccagtatggattcgttgatgttgagtaagttttgaacgacgtctaaaggccttgccacattccttacaatcatagggtttctcaccagtgtgaattcgccgatgttggattattgctgagcgaaaagcaaaagattttccacattccttacaatgatagggtttctcaccagtgtgaattcgctgatgttcaattagtgttgagcgagaagtaaaagatttcccacattctttacaactgtagcgtttctcaccagtgtgaactggccgatgttgaattagtgctgagcgaagagtaaaagatttcccacattccttgcaatgataaggtttctcaccagtgtgaagtggctgatgttgaattagtgttgaatgagaagtaaaagatttcccacattccttacaatcatagagcttctcaccagtgtgtatttgctgatgttgaattagtgttgagtgagaagtaaaagatttcccacattccttacaatcatagggtttctcaccagtgtgaatttgctgatgttgaattagtgttgagtgagaagtaaaagatttcccacattccttaccatcatagggtttctcatcagtgtgattttgctgatgttgaattagtcctgagcagaaagtaaaagatttcccacattctttacattcataaggtttctcaccagtatgaattctccgatgttgattaaggtatgtacgctgtctaaaggccttcccacagtccggacattcatagggtttctcaccagtgtgaattctgtgatgttgggtgagtcctgagacactgacaaaggctttcccacattcctgacattgataaggtttctcaccagtatggatttgttgatgttgagtaagtcgtaaacgaagtctaaaggccttcccacattccttacaatcataaggtttctcaccagtgtgaatttgctgatgttgaagtagtgttgagccaacagtaaaagattttccacattccttacagtgatagggtttctcaccagtgtgaattcgctgatgttgaattagtgctgagcgagaagtaaaagattttccacattctttacaatcatagggtttctcaccagtgtgaactgcctgatgtccaattagccctgagcgaaaagtaaaagattttccacattccttacaatgatagggtttctcaccagtgtgaattcgctgatgttgaagtagtgctgagccagaagcaaaagattttccacattctttacaattatagggtttctcaccagtgtggattcgctggtgtcgattgcgtgttgagcgaaaagtaaaagattttccacattccttacaacaatagggtttctcaccagtgtgaatccgctgatgttgaagtagtgctgagcccgaagcaaaagatttcccacactccttacaatcatagggtttctcaccagtgtgaattcgctgatgttgaattagtgttgagccagcagtaaaagattttccacattctttacaatcatagggtttctcaccagtgtgaattgcctggtgtccaattaaccctgagcgaaaagtaaaagatttcccacattccttacaatcatagggtttctcaccagtgtgaattcgctgatgtcgaattagagctgagtgaaaagtaaaagattttccacattccttacagtcatagggtttctcaccagtgtgaattcgctgatgtcgaattagtgctgagcctgaagcaaaagattttccacattccttacaatcatacggtttctcaccagtgtgaatttgctggtgtcgaattagtgttgagccaacagtaaaagattttccacattgcttacaatgatagggtttctcaccagtgtgaatttgctgatgttgatttagtgttgagccagaagtaaaagatttcccacattctttacattcataaggtttgtcaccagtatgaattctccaatgttgaataagatgtgcagacggtctaaaggccttcacggattcctgacactcatgaggtctctcatctgtatacattttctggtgttgaataagatgtgagccagaaataaaagcttttccatattctttacatgcacagggcttttccccagtatgaattctctgatgtttaacaagataggaaaagtgatgaaaggccttcccacactccttacatttatagagtttttcaccagtatgggtttcttgctgttgtgtaagttctgagccatacttaaaagccatacattctgtggatttatacagtttctctccaggatgaatccgatgatgcagagtgagagatgtctgtaggcagaaagttggtgttgtttcataagtcattattgctttttccaaatatcgctcctgatttatatcttggtgctgaaactggcctttgcattcccagtcatctctgacactggagcccacaaggctatgacatttttccattctcacccactgagatgatgttacttcatagatttcttttggcaaacatgaatctttggtcttacatctaaactccgagtctgaaaaataaccagaaagcaaaaacatagcatttccttgttgagtagaaataaaaacatctatggtagaaaggggagacaaactgaaaataatgtccttaagaattaaagatgtgttgggcgtggtggctcatgcctgtaatcccagcgctttgggagtctgagacaggaggattgcttgagcccaggagttcaaggctgcagtgagctgtgattgtgccactacactccagcctgggccacagagcaagaccctgtcttaaaaaaaaaaaaaaaaaaaaaaagatggtgtacatacatggtatacatggtgatagtatgtacccttatatgatgtgatgagaacagtattttatctctgtgatcttccttctaaaaatactgaactccagtctaatcactggaaaaacaccagacaaatcccaaaatgagagacaatctatgaaatacctggccagtactctccaaaactattgagataatcacaaacaaggaaagcctgaaaagctgtcaaagcaaagaggagccaagggaaacataatgactcaatgcaatgtgttagcctagccaagatcctagaataggaaaaaaggacattaggtaaaagctaaggaggccaggcacagtggctcacacctataatcccagcactttgggaggctgaagcgggcggaccacaaggtcaggagttcaagaccagcctggccaacatggtgaaaccctgtctctattaaaaatacaaaaatgagccagacgtgtggcccatgcctgtaatctcagctactcgggaggctgagacaggagaatcacttgagcccgggaggctgaggttgcagtgagccaagatcgtaccattgcactccagcctaggcaacaaaaaccagactccatctcaaaaaaaaaaaaaaaaaaaaaaaaaagctaaggaaatctgagtaaagtaggggtttccattaataataatagatctcagcaccataggaaaggtaaataataataacaacattgcttcaacaatgttattatttaataggatcaacattcattcattaattatgacaaatgtacaaatataaaatgttaatgggaaactacatgtgatgtatatgggaagtctctgtactaacctcacaacttttctgtaagtctaaaactatcctaaaacctaaagtttacttttttaaagtgagaaagtaacatctcactagcaaaaaggccaagcaaatttttgtaaaagacacaaatggggtatcagtatctaaaaattaaaaaatgaatcattgaaacttaaaattcaatgaatgaatttgaattggcagtataagagtgcaatcatgatttttaaaaaatactatacatcttcatccattgaagccttagaaacaaccaatctggcagcaatgaacacgctaatgacagattactgtctctaaataccatttcttactacacagaacctaggctccttggagcatcttgggattagaacagaaagtgtgcattatgagcatggaaaaagctggcatattagaaaagcaaagaagcttattcaagactcctagggtcatgtcaaaaagactcaggaaccattgtgaagagggtcccattggccaaagatgggacaagttgagcatgaattcaagaataaaaactgtaatcattgtaatgtaattacaataaatcacatcaaatttttttaaatctgtgtgttcataaggacaattttaaaattacctagtaatttttaggggatgagatgaggaatggctgctaacttcacaaaaacagaaacaaccagatatgtgcttcttgatgaaatacacaatactaatatcacatagtctgtttataggaaagaaaggagtaaagggaggagagctaaatgttaaatgacagatgatccagtttcttcaacatataaatttcaaggagaaaaagagaaagaaatcaacaacaaaacctcactggaatggttaaataactggaaatgcaaaagcaaggttaaaagtcataaagaaaagtcaaagaattcatttgtcttcctgaaagtaatactgaaagaacagggagcaaactatattcaagatggaacagctaaaatttattcagaagtgatgaggttttctaaaaaaaatctgaggtgccatgagtgccatggatggtaaattttaaaagttctacggggccaggtgcggtggcacacgcctgtaatctcagcactttgggagtctgaggcaggtggatcacctgaggtcaggaattcaagaccagcctggtcaacatgacaaaaccccgactttactaaaaatacaaaataagccaggcatggtggtgcacgcctgaattctcagctactcagggggctgaggcagaagaattgcttaaatccaggagacagagtttgcagtgagccgaaattgtgccactgcattccagcctgggcgacagagcgagacttcatctcaggaaaaaaaaaaaaaaaaaaaaagtaaaagttctataagccaggcatggtggttcatggctctaatcccaacactttgggatgccaagactgcaagattaccagagcccaggagttcaagaccagcctgggcaacagcctgggacactgtctcaaaaaaaaaaaaaaaaaaaaaaaagccgggtgtggtggcacatgcctgtagcctcaggtactcgggaggctaaggcgggaggatcacctgagcccggaaagtcaatgctgcaatgagctgtggtcaagccactgcactccagcctgggtgaccacgggagaacctgtctcttaaaaaaaaattatgcatgatgaaatcccaataataagaacaaaatggacaggaaaaaaaaaaatagcttacacaccatgcttgctatatgccaggcactattttcactgctttacacatttactatataagctcatttaatcttcagaagaatcctgtgaatagcatatatatttgcaaatgaggaccagagaggttaagtaaattgccaaaagtcatagaggtattaaatagcagagctaggatttgaatggaggcaatctggctcaagagtccatgctttcaacttccaaatcagtggaatcgaactaagtatgggcatcagatttttttaaaacctcaaatctaaaacagtgtaaaataaaacaggcaacagaagacaggaaaagtgagacaaatagaataagctggttaaaaaaattcaaacaggccaagagaggtggattgtgcctgtattttcagctactcgggaggctgaggtatgcagattgcttgagcctagggggttgaggctgtggtgagctgtgattgctccactgcactcagcccgggcaacagagagagagagaccctgtctcaaaaaaaaaaaaaaaaaaatccaaatacatcactaattataaggaatgtaaacaaagaaaaagtaaatttcaacccttttaaaataaaaagtgactaaaaacatgaggacacaaaaaagttgaagtaaaaactaagaaaatgaaaatcaggcaagtattcatgaatagaaagctagggtcttagcactggaaaaaaatagactttaaggtgaaaacattcttgggaataaagaggattactacataataaaacgttcattcaccaaaaagatataacaattctaaatttgtaagcatccagtaaaataaactctaaatatgcaaagtaaaaattgagaaaatacaaaaagtttaggcttcatcttgattgtgggagatttcttttttttagttattttttttgagatggagtctcactctgtcacccaggctggagtacagtggcacgatctcagctcactgcaacctctgccctccgagttcaagcgattctcctgcctcagcctcccaagtagctgggattacaggcgcctgccaccacgcccggctaattttttgtatttttagtagagatggggtttcacca[133 bp omitted]tgagaggtcaagcacccagaaaatataaaaggatacagaggatctttacatcaaattaacaagcatgatatgttgaacatgtgagaattctacacgcagcaattaaaagaaagcacaggaacacgtgaatccccacccccacaaaaacactgacaattcagcagtgcgtgaagtaagtctgaacacacttccagaaactggtctcatactgaccatgtaaatattgactatagtgcaattaaggttgaattcaggaataaaaaatgggaaaagaatttaaatgcaaaacatttacaaaagcttatgggttaaaaatggcatcatgcaaattaaaaaattctttttcggtttttttgagacagagtctcgctctgtcacccgtgccggaatgcagtggtgcaatctcggctcactgcaacctccacctcccaggttcaatcagttctgtgcctcagccatttgagtagctgggattacaggcatgcaacaccacacccagctaatttttgtatttttagtacagaaagggtttcgccatgttggccaggctggtctcaaactcctggcctcaagtgatccacccacctcccaaagtgttgggattacaggcatgagccaccgcacctggcctaaaaattactttgatgctaagtgatgacaataaaaattgtatcatgggccgggctgtgtcttaggcaacaggcaaaaagcaaagacaaaacctctgtggacgaaatcaacctcaactcaacgctcaaaatattctcacaaagtttcaaggaaagagagagcacttcgcaataaaaaaaaaaaacaaaaaacaaaaaaactaacacgtacagggaaatgggaaatcacatgaagaaaaaaaacagcagaaacagaaccaaaaggcttcaaatactaatattaaagagaattattatgtttaataatgcttaaagaagttagaaagtcttgacaccactagtaaataaagtaactacatagtttttttatatatctagtttttagcctttttttttttttttttttttatggagtctcactctgttgccaggctggagtgcagtggtgtgttcttgactcactgcaacctccgcttcctggtttcatgcgattctccttcctcaacatccctagtagctgggattacaggcgcccgccatgacacccagctaatgtttgtgtttttagtagagacggggttttaccatgttggccaggatagtctcaatctcctgaccttgtgatccacctgccttggcctcccaaagtgctgggattacaggcatgagccaccgcacctggccttgagccaatgttttaagtgccatatcacctacttgttcactaagatctcaactatactttcagcacactacataaccttatttccaggaagatgtgtatttgcaaatgtttacttctatttggaacacatgtttttctacccccagaggaatgcattcttgtctggagtgtttcttttcccaagttgatgcacatccacatattcacccattcatatgtgatgtatgtgtatctatgtgtgcatttttttctttttataaaaatagaattgtcctatacatattgatgtgcaacttttccccccagataacaacagataaaggatagttatatagttactatttatagatttacttcatttccttgaatagctgcataatatcccattatgtggatataccataatgtcacattttttttccccctcaagacagagtcttgctctgttgcctaggctggagtacaatggcatgatcttggctcactgcaacctccgcctcctgggctcaaccaatttgcctgcctcagcctcccaagtagctgggactacaggtatgcgccaccacgcctggctaattttttgtatttttagtagagatggggttttcaccatgttgaccaggctggtgtcgaactcctgacctcgtgatccacccgccttggcctcccaaggtgctgggattacaggcgtgagccaccgagcctggcctgtaacagtttttgttaatgcccatttagattgttactgctgttccaggaaatgtgtttctgtatatatcagaattagctacttcttttatttctgtagcagacagtccaaaaagtgagattactcattccaaatgtaggcacattttcatttgactggctagtttgatgcttcctggcagtgtcagagatggtctgttcctagccagcaatgaatattcccatgctatatagtgttgaatttttgtttatctgaggggcaaactttggcaggggtccgttgggatatgctaacaataagataactagtaaatagaagcttttcttaacccaaatgggtagatccgtcgtgattatgttggaatttcaggagttctagaaatgaatgtgcagatggttgcacaatatgaatacaatcaaagatggttaaaatagtaatacatttatgttatgtatgttttaccataattataaataaatgaaaaaatgaatgaatgagtcactcctaaaaattagtaagaaaataaaaccaaataatgaagtagaaaagatgaaacataaaaaggaagcacaaacaggaaatatagtttctttttttttttttttttttttgagacagagtcttgctctgttgcccaggctggagtgcagtggtgtgatcttggctcactgcaacctctgcctcctgggttcaagcgattctccatcctcagcctcatgagtagctgggattacaggtgactgccaccacacccggctaattttttgtgtgtttgttttagtagagatgttgtttcactgtgttgattaggctggtcaccatgttgaccagaccactcctgacctcaagtgatctgcacacctcagcctcccaaagtgctgggatttacaggtgtgagccactgcgcccagcctctttttctttttgagacagggtcttgctctgccacccgggctggaatgcagtggtgcaatcacagctcactgcagccttgaactcctggactcaagcaatcctcctgcctcagcctcccaaagccccggagttacaggtgttagtcactgtgcctggccaaaaagtgaatttttcattttaatttcaattactttacagttaaatctaattagccccatgtagctagcggctactgtatggaacagcacagctttcatgaaccatctgttgaaactggattgcaagaacctttgtgttgtcccttcacataaaaaactaaaaccttaaatgacgactcatgccttacaggtgtagtatgtatacaaaatgaggcagaactcctagcagggtgcccattttcaaacaaaatgctttgccctactatcagagactagtaagtaagcaaataaataaattcagtaacaaaaacaactattaaaaatgggaaaaaattaaaggcaaaacatttacaaaagctcatggattaaaaattgtatcatgaaaattaaaaagttctttttttgttttcttgagacagagtctcactctgtcactcacactgcagtgcagtggtgtgatctcggctcattgctcctcctcctcctcctggattcaatcaattccgtgcctcagtcattcaagtagctgggattacaggcatgcagcaccacaccaggctaatttttttatttttagtacagaggggatttcgccacatttgccaggctggtctcaagtgatccacccatctctgattaaatgctctcatctaaaatcatatggttgtggcatatcagatcttttcactttaaacttttaaattaactaaccagctacgaatacttgtctgaactgagttggatgaggcagctccagtggatcatgcatttctgtcctagactgtcatgagctttaaaaagttaaaaccaggcc[141 bp omitted]gtgtggtggcacatgcctgtaatcccagctactcaggaggctaaggcaggagaatcacttgaaccaggaagtcggaggttgcagtcagccaagatcgtgccacagcactccagcctggcaacagagcaagactccgtctaaaaaaaaaaaaaatattggcccaggaatctcacatctgaaagattaaatatgaaaatgtccatttaaataaagatacatcagagcagtcattttaaatagaagaaacacctgggcacagttgctcatgcctgtaatcccagcagtttgggaaagtgaggcagtgggaggactgcctgagcccaggagttccagaccagcccgtggcacacagggagaacccatctctacaaaaaaaattagaaattgactgggtgtggtggtgtgtgcttgtagtctgagctactcaggaggcagaggtgggaggatcacttgagtcctggaggtcaaggctgcagtgagctgtgattgtgccaccgtactccagcatgggcaacagagagaccctgtcacaaaaacaaaaaaagaagaagcaacactgaaaagctacctatacatttaatattattgaactcatgatatccaggacttgctttagttaagggaaggtgcagaggtcaacaggcatagatcaagtaagattggaaacatggaaactcattgataactactgcagctaggaaatggatttgggggatgtccattacaccatcctttctacttttgtgtatgttcaaagacctccgtaatcaagttaataattaaaaaaaaatttttttgtaatgttctatggataaagggaaatagtcatctatatcctacaattaaaacgctttttaaaatggatagtttgcattacttaaaagcacattttgaaaaacaaaatgccttatcttttctacttcaaaagaaaaatccctcagtctatgctacttacagcccaatttttgtccatgttaacattgtcaccaacttattgaaaatggatcactccttttccttgacacttaagtcttctatatttaacttattgtcctcttttatacacaatcatttcagtgtaccttttcctcctaaaagcaggcatatcctattccttcacatttatatctacagttctttcttctaagcaccatattagaaatctcctggttgagtctactttttagaaagtgatttatacaatgatttagaccctttattaggctgggtgtggtggctcacgccggtaatcctagcactttgggaggccgaggtgggcagattgcctcagctcaggagttcaagaccagcctaggctatgtggcaaaaccctgtctctactaaaaatacaaaaaattagccaggtgtggtggcgcgtgcctgtaatcttagctactccggaggctgtggcacgagaattgcttgaattcaggatgcaggggatgcagtgagccgagatcactccactgcactccagcctgggcaacacaaagagatattgtctcaaaataaataaataaataaaccctttattagactgtaattctgatagcttatatcttccataactgtcacccaccaagaaaagaaggctttatgattttttttttaagtcaataaattttgactaaaagtgaatgaggtcagacgtggtggctcacacctgtaatcctggcactttgggagaccgaggcaggtggatcacctgaggtcaggagttcaggaccagcctggccaacatggtgaaaccctgtctctactgaaaatacaaaaagtagccagttgtggtggtacatgcctgtagtcccagctactcaagaggctgaggcaggagaattacttgaacccgggaagtggaggttgcagtgagccaatattgcaccactgcactccagcctgggtgacagagtaagactctgtttcaaaaaaataaagtgaatgaatatccattgatgcatgaaatgtctgcatcaaaggaaaactagacaagacaacacacaaaaaaagttaaggatcagtatgaaaaataaatatattttgaaaaaaaaattttttaaagcaagaacacaggtttaaatttcaaagggaaagaagtagcttgaagacagaggaaacaggatggctcccgaagaagggaactttattctttgaaatgggaagaaattatgacaagagggtagcacagactgaagaggtggaagtaaaaggggattcttggccaggcgcagtggctcacacctgtaatcccagcactttcagaggccgaggcaggtggatcacttgaggtcaggagttcgaggccagcctagcccacatggtaaaaccccgtctctactgaaaatacaaaaattagctgggcatggtggtggatgcctataatgccagttccttcaaaggctgaggcaggagagtcgcttcaacctggggacggaggttgcaatgagccgagatcatgccactgcactccagcctgggcgacagagcgagactccatctcaaaataaataaataaataaataataaaattttaaaaagtgtgtgtgggggtgtatcgtgacttctcttcatgtgtcttaggccaccacccttacatgggaccttgaagaagagactcctcaaccaatacctgtacggtgctgcctccctgacaggctggcttctaaacagcagtgtcttccccatgtgctcagtccttactcacctcggcaccatcctcccagcacgtcccttgaaaccatccagggctctttcccttgctccagtaaggaaatcacatcaggctttgggatagagagacctgtttataagaaaagaagtaagatagccaggcatggtggctcactcctataatcccagcactttgggagaccaaaacaggtggattgcttgaggtcaggagttcaagaccagcctgaccaacatggtgaaaccctgtctctactaaaaatacaaaaattggctgggcatggtggtgggtgcctgtaatcccagctactcagaaggctgaggcaggagagtcgcttgaacccgagagacggaggttggagtgaaccgagatcatgacattgcactccagcctgggcgacagagtgagactttgtctcaaaaaaaaaaaaaaaaagaaaagaagtgagacatactcctgctgttcctgaattcaaagttagtcccttagtcctcatgaaggactagaggaaggtgtagagttctgaagcatggagaagatggagtgaccccaaagagctgcccatctattaatctacaaaacacaaaacaattccctaggcaacaggtgaaaagtcacccagacaattgaaagctacacccaaaattcatgagttatttgcggatagacatccttacctagtgagaccaggctgctgtagttctccatcattacatctctgtataagtccttctgagcagcgtccaggcactcccattcctcctgagagaagtctatagacagatcctggaacatgaccaacccctgaaatgacaaacccatgcagcgctgttgaaattaaaggaaaggtttttaagatgaaggaagagatggaagggtgctgaaggatggagagaatacagtgagcagaccagctaggatgagagtggggaagagtaaaaaaattagtgtaacttcaacaaagtacctccatgttcatgaatattcctgttgcagccagcaaacctccttcatagaatgggacattccgaatattccatggttagagctgggaatgaataaaacacattgatatattatttcccaaataaatgaactagagtacaaaagcacacagcaagctgtaggcctagcaaagctgaaagaatattacagtaaacatctgatatgcaaattactatttacaacaaaagcttaataaacaggcactcctcccttaccactttctttcttgtttttttttttcctcttgtttcatttttttgtttttgttttcgttttgagacagggtctcgttctgttgcccaggctggagtgcagtggcatgatcacagctcactgcagcctcaacctcccaggctcaggtgatcctctcacctcagcctttgtgttagctgtgactataggcgtgcaccaccatgtccagctaattttttgtatttttagtagaaacgaggttttgccatttggtcaggctgctctcaaactcctgggctcaagcaatctacctgctttggcctcccaaagtgctgggattacaggcatgagccaccacacccagcctttcctcatttcttaaaggaagacaggatctttcaaaaatatctacaaaaagtttaaaaacctctattggctgggcgcggtggctcacacctataatcccaacattttgggaggccaaggcggatggatcacctgaggtcgggagtttgagaccagcctgaccaacatggagagaccattttagtctctactaaaaatacaaaattagctgggggtggtggcgcatgcctgtaatcccagctacttgggaggctgaggcaggagaattgcttgaacctgggaggcagaggttgcggtgagccaagatcgcaccactgcactccagactgggcaataagagcgaaactctgtctcaaaacaaacacaacaacaacaaaaaaaaacctctaatgcacttcactaattagtacttccataaaatagtatagatagcacttcgataattaaatgtacattggctgggtgtggtaacccacacctgtaatcacagcactttgggaggccaaggcagatgaattgcttgagctcaggagttcaagaccaattctgggcaatgtggcaaaaccccatctctacaaaaatatatatcatatacaaattagccagatgtggtgggacatgcctgtagtcccagctacttgggaggctgaggtgggaggattgcttgagcccgggaggtcgaggatgcagtgagctgtgatcctgccactgcactccagcctaggcaccagagcaagatcctgt[131 bp omitted]gaaaccccgtctccactaaaaatacaaaaattagctgggcatggtggcacacgcctatagtcccagctactcgggaggctgaggcagaagaattgcttgaacccagaaggtggaggttgcagtgagccaaggtcatgccactgcattccagcctgtgaaggatcaagactccgtctcaaaaaataaaataaagtaaaataaaatacaaaagtgagtatcatggtatgaataaactgcacacaggtcagacaaaagttacaggggcatctgccagtataagcaagtttcctgtgagacacctggtcatgggtcagacacttgagcattaggctgtgggccaggaaaaataaatgtctggtgaaaggctactgtaaagacccacaagcccctcccctagagccccattagggtgaggctagagtttattatagccattctcctgagagacctcaagacccaattagaagaaaactacaacatttgttacatagaaggcattttccaaagagtaattcaaagatagtcttcctttggatataaaacaaaatctcaagatacgccaaaactgttttgtttttactgaataatttttgtgcatgtgtgttgttgctttagctgcaagtggctaacaagctgtgattttcttttctttcctttccctttttttttttttttttttttgaagcagtctcgctctgtcgcccaggctgaagtgcctgatctcagctcactgcaacctcagcctcctttagctgggattacaggcgcctgccaccatgccgaactaatttttgtatttttagtagagacggggtttcactgtgttgctgaggctggtctcgaactcctggcctcaagtgatccacccaccttggctcccaaagtactgggattacaggcgtgagccaccatgcccgggcaactctgattttctaacttgccccctgtattagggtcatactaggaaaaaaacaagtcagaaccattggagccacgtgtacagatgtgcagtagccctgctagcaacattgctgcttgctttggctcttaggagagatgagttcagcacatgtctgcccttgctctagctgtctctgattcccaacagatgcacaatcatttcactccattagtttcactttggatatcccatcattagattaaaaccagcaggccaaaaagctaacttgaagaaatgctttcacatccacagcattctcatagggtcagtatcatttagacatgacaggaccgtggttgcaggggacagaatgaagtgtcatccttaactggccatccaatgtcatcagcatgaacaggaggactttatatgatattatctgatgttttctgaatattaccttacaaatgctgctttatttataactaaagaatagggaccctgtcttttaaagctttatatttcctcaagtaaatgtttttcgtattaaatccattaataatatctagtggctgacctggaaattccatttctaagtacttatccaaagtaaagatttttttttttttttttttgagatggagttttactcttgttgcccaggctggagtgcagtggtgcgatctcggctcactgcaacctcctcctcctggattcaagcgattctcctgcctcagcctcccgagtagctgggattacaggcatgtgccaccacgcctggctaatttggtatttttagtagagatggggtttctccatg[137 bp omitted]tgttgcccaggctagcgtgcagtgaggtgatcacagctcactgcaacctctgcctcctgggttcaagtgactcttgtgcctcagccatcaaagtagctaggaatacaggcacacaccaccacacctggctattttttttggtatttttggtagagaccgggtttcaccatgttggccaggctggtctcaaactcctggcctcaagcaatccacccaactcggcctcccaaagtgctgggattacaggcatgagccactgagccaggccagagaattttaaaagtatgaagttgtatgcagaagaatgttccttgaagacaaaaccaaaaaatctgaaacaaatgtcttgttggtagatatataatacaatactttttaatgggaaagatatgcaatattgagggagacagggaaaagagaaagcagaaaaaagaagagagaaaatgaaaattactattaggacttaaagctatttctccccagtctgttttccatacacagaacaatacagatgtgaccgcagtacacatataattttgtattctcctttacactttgattttttcttatcaaaaacactttatacatggcatttaaatggcttataactttcctaaatggctactacactgtgtacttaaccattctgtttccttctacttatgatttttgctgcaaacctttcccctccgatctgtccacatttaaattcctttaaggaagggggctgtatagaaattttaatttatgtgcattttactgaagcctacctttttctttatggtttcttttcttatttctaaacgctaatctatttgaatgtggtcaaccattccttaaaatgaacacaaacaggaaaaaattggggaactgtgtccttcaaaatataagtattttggccatgtgtggtggctcatgcctgtagtcccagcactttgggaggccaagacgggtagatcatttgaggtcaggagttcgagactagcctgaccaacatagtgaaacctggtctctacttaaaatacgaaaaaggccaggcgcagtggctcaagcctgtaatcccagcactttgggaggccaaggtgggtggatcaccagaggtcaggagttcgagaccagcatggccaacatggtgaaaccctgtctcaaattaaaatacaaaaagtagccaggcgtggtggcaggtgcctgtaatcccagctactcgggaggcagaggcaggagaatcgcttaagcatgggaggcagaggttacagtgagccaagaccgtggcactgcactgcagcctgggcaacagagcgagactcagtatcaaaatataaataaataaataaatataaaaatacaaaaaagtcgggcacagtggctcatgcctgcaatcccagcactttgggaggctgaggcgggcagatgacttgaggtcaggagttccagaccagcctggccaacatggcaaaaccctgtctctagtaaaaatacaaaaattagccgggtttggtggctcacacctgtaatcccagctactcgggaggctgaggcaggagaatcgcttgaacccaggaggcagaggttgcagtgagcagagattgtgccattgcactccagcctgggcaacacgagtgaaactctatctcaaaaaaaaaagaatacaaaaaattagcaggctgaggtggcgcatgcctgtaatctaggctactcgggaggctgaggcaggagaatcgcttgaacctgaaaggtgaagattacagtgagctgagatcacaccactgcactccagcctgggtgacaagagcgagaatctgtctcaaaaagaaaaaagaaaataaaaaagaacttttatttgggggaaaaaaaaaagaactccaaaaaaacaaaaatggagtgaaagggatttaaggaaattgaaagtcaacaggctaataatgccaataaataatgatggagcaaagaaatccatgttggccaaataacaccaacgtgtttttaaatagtttttcaaaatttagacagttttccagtacactgagacacttctgctatcaagactataatagtggctgagcacagtggcttacgcctataatcccagcactttgggatgccaaggcaggaggatggcttgagcccagaagttcaagtcaagcctgggaaatatagggagacccccgtctctgcaaaaataaaataaaataaaataataagccaggcatggtggtgtacatctgtgaactgtgaccaccccactgcactctagcctgggtgacagagcaagaccctgtctcaaaaaaaaaaaaaactataatatagagtaaatgacattcaggtaagtggaatattaggtgttcaataaacgtaggttattccctccctatctccataaaatcatcaatttttttaaaagagaaattttgattagaatctttaaaaatatcaatacttctctttccaaaaaaggagggaagatttaaatataacaatttctcaagtatttctatttattttcattgttgcttaatattactcataataatgaaaatgcaattgctctctttcaaacatagttttaattagttgtacaaaatgccaccttatagtctgatgtacttcaaatttccctatctatgaaagctaaatttggatattttcatctcaagtatattgtaatctctgtctttaaatctatctagggttctaccttttctgtcatccttagtgaatctcactatagtcctccttccctttaaaaatgcagtgataggccaggtgtggtggctcttccctgtaatcccagcactttgggaggctcaggttggaagattgctggagctcaggagttcgagaccagactgggcaacatggcaaaaccctgtctgtgcaaacaatacaaatattagcccagcatggtgccatatgcctgtaacccagctccttgggaggctgaagtgggaggatcccttcagccctggaggtcaaggctgcagtatgccatgatcctgccactgcactccagtctgggtaacagagtgagaccctgtctttaaaaaaaaaaaaaaaaggccgggtgtggtggctcacacctgtaatcccagcactttgggaggcagaggtgggtgaatcacttgagatcaggagttcatgaccagcctggccaacatggtgaaaccctgtctctactacaaatacaaaaattggttgggtgtggttgcgggcacctgtaatcccagctactcaggaggctgagacaggaagactcacttgaacccggcaggcggaggctgcagtgagctgagattgtgccactgcagtccagcctgggcaaggcagagtaagactgtctcaaaaaaaaaaaaaaaaaagaaagaaagaaagaaagaaagaaagaaaaagaaaatcagtgataggtgaggcagctcaggcctgtaatcctagcactttggaggcagaggtaggaggatcacttgaactcaggagttcaagaccagcctaggcaacctagtgagtctttcctagtgaaaattatttgtaattatgccagagtgctggtgtgtgcctctggtttcagcttacttggtaggctgaggtaggaggatcacttgagcacaggaaatcaaggctgcaatgagccgagatcgtgccactgcactccagcctgggagacagagtgagaccctacctcaaaaataaaaataaataaataaataaaaattcagcgatggagttgatggattcgaggttgagaacccccaatgtgaacccatttggaaaaaactcaaactatgttcttcctctgcttcacaacaaaaccacaacaatcaaaccagaagacttctgtggcctcaaaatccaaggagatttctccccatcagcaagcaaggaatcagttctgcagcagacaccagctgggtgtccaccaattcgattctgacactatctaccatgagatactgtcatcccacaggctaagggctcagcccccaaaactggtcccctttcagacaccagtcacaagtcccagcctctacaacttctgactgacgggttcaatttgggattcctacgaccccctctttgggttcgattaatttgctaaaataaaatggctcacagacctcagggaaacacatttactggctgattataaggatattccaaaggatacagatgaagagatgcctagggcgaggtatggggcaaggggcacagagcctccatgccctccctaggcacgaccctccaggaaccaccatgtgttcagctctctggaagctctctgaatccaccccttttgggtttgtaaggaggcttcattacataggcatgattgattaaaccactggctacttgccatcaacttaatcctcagtcccctccactccccaggggtgggagggtaggggctcaaagtctcaaccctctaatcctgccttggtctttctgatgaccagcccccatcctgaagctttcggtcaatcactaacatacaaaaagccaaaggctgggtgcagtggctcacgccggtaatcccaacactttgggaggccgaggcaggcagatcacctgaggtcaggagttcgcgaccagactggccagtatggtgaaaccccgtctctactaaaaaaaacaaatacaaaaattagccgggcgtggtggcgcgtgcctgtagttccagctactcgggaggctgcggcagaagaactgcttgaacccgggaggcagaggttgcagtgactggagattgcgccactgcacttcagtctgggcgacagagagagactccatcaaaaaaaaaaaaaaaaaaaaaaaaaaaaaaaaaaagccagcacttaagagattccaaggactttaggagttgtatgcgaggaaatagggacaaagaccaaatctgtatttgagaaaatcacagaaccgtatgagtatttaattcaatacagacatggaaactggcccaagcatttactcacagatgactgggcaaatccctggtgttattggtacaaactattgatcgagcccccaatctcattcctacccctaaaatatagcaaagtgaaagatcttatcacttatttggactgagattaacaccatcccataaactgcatggctttcaatcccagggctatggcgtgtgatgccacatagaatatgcactaatctctgcagcaattgagttgttagggtaaaggctcttgtttttgccttctttctctcacggccaagaaaattaaggaacagggacacaaaggatgaggtcggagcggaagtttaataagcaaaagaagaaagctctccccagcggagggacccaaaagagggttgccaactaggaggctgaatctgggggggtttattaactgggaaggggaggaacgtgggctgtcttgaagaaagcactacccagcttggccctgggaccttagcccgggaccaatcccaggctgaagtgaaagtttggcccaggaccaatcaggggctgaagtgaaagtttggcccgggaccaatcaggggctgaagtgaaagtttggcccgggaccaatcaggagctgaagtgaaagtttggcccgggaccaattaggggctgaagtgaaagtttggcccgggaccaatcaggagctgaagtgaaagtttgggccgggaccaatcaggagctgaagtgaaagtttggcccgggaccaatcaggggctgaagtgaaagcttggcccgggaccaatgagggggtgaagttatgattcaaagaggccgcgctcacagtctaaagcatgtccaaaaaaggaaagtggccgccggaacctgttagtccaagctgcaccgtttcgtaagcccccaccatttcacagaccctggtcagagggaaacattccacccgggtttgggctgtgcgaaacatccttcccaaccgcctgacttccttatcacatcctgctgggcaaaagcccaagaaacatccttatcaactttctcccaggcaacaagccataccgcccagacccctcctgcccaggcctgtaattaccccagcctggaagcggcagtgggctctggcatttagttggtccccgccatagagccgccaactctctctctttctttaaccctcgccttcccttcaaaatctaacagagcccaccgtgtacatgcccacaaaagaagcgactatttcgtggaagcccgctggtcacacaaaggacaaaggcgtttctatgttgggcctcggtcccttatcagtgcagctgaggaatgtcttcaggacaacccccctgtggagttttccttatgtatgcctgcagcctgatttttcaggctgtttctctgtttaaaggacttttaccaaggtcccaccctaactgcctaaagagttttttctctcaaggggacacacaaagtcccaatcgcacacatgcctccgcatatccacttacccactgcctcacagccaatcacactctcctctctcacatacaccaaggggccacacaagttgcacttgcacagccacagacctgcaactcacgcacacaaggtactgcacagacacgcaaagtcacacacccaccccgggacacgcagtccaaccacacagtcaccggttcttcacatccgcacgcacaacgagggtcgtccaggacacacacacccactccgggcgcgcacagtcacaagcgcccacctgatcacccagagtcagcaccacacagccacagtcacagaccacggagacccacggcagccatcgcgatcacacacgcaaactcctctcctcagccctccacacacaaaaggaccggagccggattcctcaccctcagcattctctggttccgctcggggccagcctagccaagttcctcaggactccaaggcgcggcggcagctaaatcggcacagcaaacggtcccgccacctggctaagaggaagccaaaatctcgcgagacgtggcgtcggcctgcgggatcctctgggaaatgtagtccagagcccgactgcgggcttccctatgcctctcatttccaagcctggcttgtttccttttaccgctcctctccaacgaggatcgcagagccctcatgccgagcggctcgctatggggccggctcgcccgctagagtggtcaggcctgattatccctggcagctctgttatctggggtaagacacaggaaaacgtgcttccggttctcggcggaagtagccccgaacggtagaaccgatgggaaatgtagtccagggcagaaaagcggtcaacccagccacgatgcgagccaaaggattcttggctccaagcctggtcctggctgttagtttggaactcatgcacccagatgctaactcgccctcagaatgcagaggggatgaaacactgaccggacaattcaatctgtatatgggtgagtccagggctcagtctgcattgcgcggaaaatgaaggtgaaggtggaggtgggacctgatggtctcgtcccggatagggttgaagaagtgggagaaaaggaatcaaaatcgtggatgggataagattgtgcgcgaatgctctctgggagcggatcgtggccgacgagggcccgaagatgctgccttgtgatcgcaggtgtgagtggaagctgtgtgagtgtcaatgtgagttgcctgtttgggagaccagcattgtatttttgtatcaggtagtaaccttggagccaggtatttgtaaaattatgataagagggcatcattctggagcatcgattttatttggaggttgacaggagagggaaaaaaacccctaatatctgataaacaacataaatagatttttatgttaaagtagttatatttattacggtctagaatgcaaatccaacatggcttttaaagcaagaaagattttttttatacaaagtcaaaggtattatttttatacacttactacaaaacatacaaatagtataccaagcctaagaatataaagagtctagctttaattaattgaatgtaaatttaaaaacaagcatctaataagtagtccttttcacacatcgaaaagccaatttcggaatttttttaaaaactcaaattacaaagtaacaaatatctggtgtcttagtaacttgaagatcagtactaatgattaagccagcttatatgctaatatgatacatgaaaaagcctgtatttcacaaatagcaaaccactaaaactttaattttccacagaagccattgtttcacaccaataattatgttaaagatcaagacaggctaaaagtttttaatgagcactgaatccattaaaacttggcaaatttttccacgaaggtagaattttaatttctgtttaaaccatgggtagatggtacacccttgtgagggtgtactgtaagtacttctaaggagctttatcagacttcatcccaaattatgtacctagtaaaagatgtaccaatgtctactttggaataagaaattattccttgtttgagcaaggattaagcagaaactgaaagaagtgtagtttatagcttcttacataaagtagatgggcacccctcaaaaacaaaccaatatcctggctccttaaatatcaacattaatctaaataatgtatagcatgctcctgtccaatctttcccgctcatttgtagtcttctcagatcgatgcttcattttagtcacacatttctatcctgcaagactgggtacctgggctttttgtctggttttgtaacactaggcagttttggccttactcaaaatataagactgcaaaaggcctgttttacctcaaccatacggcttcaggaaatggtctgtatttccaacagaaaagtggtatctaactctcaggatggtttctaacaactggatagatacctgggtctttgcggcctgtgatgcagcctaacaatacaggaccttgtgtgatcagctaggtctgctaaagcaaggggacatccatgttctagatttttatttatttatttttttttgagacggagtcttgctctgtcgcccaggctggagtgcagtggcgtgatctcggctcactgcaaactccgcctcccgggttcaagccattctcctgcctcagcctcctgagtagctgggactacaggcgcccgccaccacgcccggctaattttttgtatttttcgtagagacggggtttcaccg[137 bp omitted]ctgcctgtcctgaagagactctctttctcttccatacaacggctggcctctaccaagttaactgcttcgtggggggaaaatattgcctttcctttggtctgcatgttttaagggaaataccaaatacacctacaggagtttatcaataatagacaaggctgatttcaaactctttcaggagataaactggaggggaagacgaatggcaggagggtgaagaggaaactgaattactgtgcaaacacccgccactcaaatccgggtggttactgcagagtgaataacgataggtactatttcgtgtaaggcaaagtcctttgaaagggctcctagagcgtcaaggcctccacctgatgaatgaatgagtcaggcaggcccagctccacttcacggatgggaaaactgaggtacgaggcctcgctgaaagatgcgaggcagagcggagaaccagaagcaccacttctctcaggctgatgctctaatctcggctccccccgcccctacaatggcgtagacggcctccgccgcccgactcacacacaccctcccccgggaacggcaagtctcctcgggttccaaggacagggtcaaaagacaagaggcccgaggcgctcccgccgtgatttgcagccagataccgttgggagcgcagccagagagcgttgggagcgtgcgtacctccagcccaacatggcggcggcagcggccgcccccgaccccaagccctccctcagggcccgaggcttctcctcagggccttccggtgggcgggaagacagcgcaaccccgccaggcctttctcgtcgctgcgcctgctcgctgaaggagtcacctacccgacgagactaacggctgcggcgcggaagccccacagcccgccgagaaccaggaatacgagagccaggcggcgcggcggcgggacctgtactgagcaagaaagaagatttcaaagtaatttattgttatgagatccgtgcttttatcttgtctcagactcccaatgataggcacatactctcctctgtacatttaatgaaactactaaaatatttcgatttaaatcttccacctatttgttttctgtgtatcctacctgttcccgaccttgacattttcaaagaatacaggttacttattttgttttttggtggtggtgagtttttttggggttttgttttttggtttttggttttatttttggagacagggctttgctgtatcgcccaggctggaatacagtggcgcgatgatagctcactgcagcctcgaactcctgggctcaagggaccctcctgcttcagcctcccgagtagctgggactacaggcctgcgccaccacgcccgggtaattttttattttttgtagagatggggtgttctatgttgcccagtgtggtctcaaactcttgggctcaagagatcctcccacttctgctgcccaaagtgctaggattacaggcatgagccaccgcgccgggacagttattttgtagagtgttctttaatttggatgtacctcatcttttatgtatctttgggaggaataccacataactcatgtggtttatcccatcgagagacacacagtgtcaatgtgttccattcttggtgatgttaacttttattacttagtgaaaataattctaagagatttcaccactgtagagtgaataaatgaatatgtgggattcatcaatgaataagtaaaaggatgccaactggcaaaagaactgagttgggaggatggcttgagcctgggaggtcgaggctgcagtgagccgtgatggcaccactgccctccagcctgggtgacaaagcaagaccccgtctcagaaaaaattaaataaataaataaatacccagcacctgaacatctcgggcatttcctgtgcctcttatattgggtccctggtttcttggagcgtatgtcttttttttttttttcttggtttagcttctcatttttgtaaaaaacacgttcttattttgtttaccattttgacaaaggcgaatttgggttaaaactttgggacccttataagcttgacagtgtctgtattctacctcttttggatgacaccttaactaggtttgaaattttaggttgaatgtggttttcacttagaattttgaattatataacattgtctgctagcttacagtgtttatcttaaaatatgacaatttgatttgtgttctgttactgttctttgtctttcaaagcatttaaaggccaggctcagtgattcatgcctgtaatcccagagttttgggagtacgaggcaggaggattgcctgagctcaggagttcaaaaccagcctggatgacataaggagaccctgttttcataaaagtaaaaataggccgggtgtggtggctcacacctgtaatcccagcactttgggaggtcgaggtgggcagatcacctgaagtcaagagtttgagaccagcctggccaacatggtgaaacgctgtctctactaaaaacacaaaatattagttgggtgaggtggcatgcacctgtagtcccaggtactcaggaggctgaggcaggagaattgcttgaacccaagagggcatggttgcagttgagccaagatcgcgacactggactccagcctgggcaatggagtgagaccctgtctcaataataataataataataattttaaaaaacatttaaaattgtctcttcgtactagttttctgaaatttcacagaaatgtgttttggtgtggttcttgtttctttcgttgtacaaggtactcagtggatctttgtattaatattttgaagactcatgatctgtgtttctagaaatcgccttttgtttgttctgtgaagttttcttccattcatttttcttctctctttctgaaattctaaacatccttttagttggatgttataatttctgatttcttctggtagttttgtcatctttcatcccttttatttttatttatttttattttttgagatggagtctcgttctgtcgccagactggagtactgcggcgcgatttcggctcactgcaacctccgactccctggttcaagcaattctcctgccttagcctcctgagtagctgggattacagacacctgccaccacacctggctaatttttgtatttttaatagagacggagtttc[141 bp omitted]cagcatacttgttggagtcaaacatttgttactatccaattattattattgttatttgagatggccttttgctctatcgcccaggctggagtgcagtgctgcactcctagctcactgcagcctcaacctcctgggctcaggtgatcctcccacctcagcctctcaagtagctaggaccacaggtatgtgccaccacacccagctaatttttttattttttatagagacggggtttgaccgtctccaggctggtgtcgaactcctaggctcaagcaatctgactgcatcagcctcccaaagtgctgggattacaggtgtgagccactgtgcccagcccaactatcatcatctttatttttattattattattttttgagacagagtctcactctgtcacccaggctggagtgcgatggtataatctcagctcactgcaacctccgcccccgcccggttcaagcgattctcctgactcagcctcccaagtagctggggttacaggtgcttgccaccgcgcccagctaatttttgtatttttagtagagatggggtttcacaatcttggccaggctggtgttgaactcctgaccttgtgatctatccgcctcggcttcccaacgtgctgggattacaggtctgagccaccgcgcctggccactatcttattattaaataatgttacatgcagtgtctttggggagagaattcagtttttcagagacagactttgctcatttcctgatttgttcattttaattcaaatagtaaaagctttagaaaggcatgaggattgcttgactccaagagttcaagaccagcctgggtaacaaagcaagaccccatctctacaaaaaacactttttaaattagccaggccttgtggtatgtacctgtagtctcggctactgggaaaggtgagttgcgaggatctcttggggccaggagttgaaggctgcagtgagctatgattgcaccacttcgctccatcctatgcaacagagcaagactctgcctcggtcaatcaatcagtaaagatacttatcaaaagtaagcagacatgcaggcagatcacctgaggtcaggagttcgagaccatcctgtccagcatagtgaaaccctatctctactaaaaatacaaaaattagccgggtgtggtggtgggcgcctgtaatctcagctgctcgggaggctggggcaggagaaccacttgaacctgggagacggaggttgcagtgagctgagatcgcaccattgcactccagcctgggtgacagagcaaaactccgtctcacaaaaaaaagtaagcagacatgtctgctgcctacgtgaggtttacattctagtctgggagaaaaaaaagattttaaagtaaaaggagaaaatgaggtaattttatatcgtgatcaatactatgaaataaatcaataggtggtataagcagtaacttgagggatacttcccgtagcattgataggacaggtgactgagagataacccttgagctttggtggtgaggagtcagcagtgtggaagggtattccaagcagaggcacagttacactaaagatgctgaaaaatcagagagcacttggagcattccagaaacagaaagcagcctggtgtgactgaagcttagcaagtgagtgggaaattagtttagatttaggatgcagaggtcagcattttccatatcatgtgaggaaatgatagtgctgagattacaggcatgagccactgcacccagccccaaaccaagtttttacagtggtaagaatagatgttctgctatggtcagtgtctaaagattttacaaacaatatctcttctagtttgcagtcattattgaaataacaaacacgttctattgtcaggccttactatcactaactagtttcattgatctgaataggaaacttacttgattaatcagctactctggtattacctgacatctcattaatgcatctatgaattgaattgttgctcaataggagtgattgttaaatagtggcaatgtgatatatcactattgaagttatggcctctaatgtgggtcctatgacagtttcggcaactctgtaagcactacggggttttacaatgatttctgcaattttttttttgttttttttttttgagatggagtctcactctgtcagccaggctgcagtgcagtggcacgatctcagctcactgcaacctccgtctccctggctcaagcgattctccttgcctcagcctcctgagtagctgggattacaggtgtgtgccaccacgcctggctaatttttgtatttttagtagagacggggtttcaccatgttggccaggctggtctcgaactcccgacctcaggtgatccacctgcctcggcctcccaaagtgctgggattacaggtgtgagccaccgcgcctggctgatttatgcaattttataaggcaataatttcatcataatttgtttgcttatcctttttttttgttttttgagaccgaatgtcactctatcgtccaggctggagtgtggtgctgcaatctcagctcactgcaacctctgcctctcaggttcaagtgagtctcttgcctcagcctcccgagtacctggaattacaggtgcacacaccatgcccggctagtttttgtgtttttagtagagacaaggtttcaccatattgcccaggctggtctccaactcctgggctcaagggatccacccgcctcagcctcccaaactgttgggattacaggtgtgggccacctcacctggtcgcttgtccttcttaaataaggaagtaacagtgttacagttcaaaattctattttaaactttttaaatattctgcttctcgactttatcaggatgtttcttttttcgatgatccacaaatcttgatggtttcatagccctgtttgtaaaaaaacaaaacaaaacaaaaacaaaaaaaatgattattcataagaaacaagctgttttgagttaaatggggttttcaataaaaccgtaagctaggtcgggcgtggtggctcacgcctgtaatcctaacactttgggaggccgaggtgtgtggattgcctgaactcaggagtgacacagagtgagactccgtctcaaaaaacaaaaacaaacaaaacaaaacccgtaagccagatattcattcattcagatgtagtcaacatttttcattttcaacacttaacacaattaatgctaggttgaattattttcataatataactattttacataattcccaaagcactgaggatcaatcataaatactatccacaaggcagccaatagacacacacagaccacctctcatgtaactttgggatagagcattcaatcaagaaaaagtcttccgattatagccatcaatttgccatcattttgtagcactgatcttgcatagatttttttttttttttaagatggaggctccttctgtcgcccaggatgaagtgcagtggcatgatcagctcgctgcaacctctgcctcttgggttcaagcgattctcctgcttcagcctcccatgtagctgggattacaggcacgtgccaccacttccaggtaatttttttgtatttttagttgacacgaggttttaccatgttggacaggctggtcttgaactcctgccttcggtgatctgccttcctcggcctcccaaagtgctgggattacaggtgtgagccactgtgcatggcctgatcttgcgtggactttttatcttccataaaatgttcaatgctgcccataagacttgagagaaattaaataccaaggagtaaaattctgtgcaataggccaggtgcctggtggctcacacctgcaatcccagcactttgggaggccgaggcaggcggatcacttgaggtcaggagttctagaccaatctggccaacatgctgaaactccgtctctactaaaaatacaaaaattagccgaacttggtagtgcatgtctataatcccagctacttgggaggctgaggcaggagaatctcttgaacccaggaggcagaggttgcagtgagccaagattgcaccaccgcactccagcctgggtgacggagtgagcctccaactcaaaaaaaaaaaaaaaaaaaaattgtggaaggccacaaaccattgcaacaactataattcattttaccttcagtaaccaatgttcaccctcttaggggcaatatcacacccattaagaatgcttggccaggcacagaggctcatgcctgtaattccagcactttgggaggccaagggggggcagatccactgaggtcaggagttccagaccagcctggccaacgtggtgaaaccccgtctctactaaaaatacaaaaattagctaggcatggtggcaggcacctatcgtcccaactactcaggaggctgaggcaggagaatcacttgaacctgggaagtggaggttgcatttgagctgagattatgccactgcactctagcctacatgacagagtgagaccctgtctcaaaaaaaaaaaaaaaacttacagtaaggctaaataaatatacaaattaggtgtgtgtgttagtatacatacatttcctagttctgcccactaagagggcctagaagcaatgacacaccagtagcaatgagcacacttgtcaccctgatcttggtgattttgtttttgttttgtttttaaaaatagagatggggtctcactgtgttgcccaagctggtctcaaactcttggcctcaagggatcctcctgcctcagcctcccaaaatgttgagattacaggcctgagccacctcacccagcccaagattttggtgctttgtaaataaaactcttcaataaaagaaaccaaggatctttaaatgaatggtttattccacgtctgggtcagggaaaatatcaaatgaatcaaaacattttatggtgccagaaagttgggaattagtcccgtaccccagccccctgataaaggcatgctataaatggaatacaggagccaacctaaagaaactcccaaggccagtgttctttttttttttttttttaagatggagtttcactcttgtcgcccaggctggagtgcggtgatgtgaggtgtgatcttggctcactacaacatccgcctcccaggttgaagcgattctcctgcctcagcctcccgagtaggtgggattacaggtgcccaccaccacactcaactaattttttgtacttttagtagagacagggtttcaccatgttgggcaggccggtctcaaacttgtgacctcaggtgatcgccaagcctcggcctcccaaagtgctgggattacaggtgtcagccactgcgcccggcctactttcttattgttttcagtatcataaccatgtacatgttcaattgcgcatatactatgttctctacaaaggtgcagtttggacctgactcatctctatctccagctcctaggaacataggaggtactcagttacatgcttgaaaactgctggggaacagaaatataagtctaaggaccatgagtaacattcattttcatctaccacaaacagatatacaactcatctgagccttggtttgattcattcattcatatgttcattctttaatttgtgaagtacttataaatgtcaatacacacttgataatgtagtggatgctggaaattcaggagtatccattcaacttccttacgagatctatggaataaagtatgtactatgctcaaggtgagcacatggttctagaaaaagccagaggaaaagtagctcatttctggaaaaggtgatatctgagctgaaaaaatgttttcacgtagaagtgaacaaggttactaaaataagtactactcaggagtatgataatgagcacggacgtctgagtagaatagaggtaaaggtcactgggattaataaagcaaggtgtggccaaggcgagcggattacctgaggtcaggagttcgagaccagcctgaccaacatggagaaatcccgtctctactaaaaatacaaaattagcccggtgtggtggtgcatgcctgtaatcccagctacttgggaagctgacgcaggagaatcgcttgaacccaggaggtggaggttgcagtgagctgagatcacaccattgcactccagtctgggcaacaggagcagaactccgtctcaaaaaaaataaaataaaataaataataaagcaaggcacacggcctgatcttgcctagattttttatcttccatgaaatgattaatgctgctcataagacttgagagaaattaaataccaaagagtaaaattttatgcaattggtcaggcacggtgcctcacacctgtaatcacagcactttgggaggctgaggtgggcagatcactggaggtcaggagttctagaccagcctggccaacatggtgaaaccctatctctactaaaaatacaaaaattagctgtggtggctttcctctagaagagctgggtgcagtggctcatgcctgtaatcccagcactttgggaggccaaggcaggtgaatcacttgagcccaggagtttgagaccagcctgggcaacctagagagacctgtctccacaaaattattggggcatggtggcacatgcctgtggtcccagctacttgtgagtttcaggtgggagggtcacttggacccaggaggtcaaggctgcagtgagctgtgatcacgcaactgcacttcagttcggatgatggaggtgagaccctgcctcaaaaatataaagtattggtactctacaacaagagcattgcattgtcacccatgtagacaataaattgactcagaatcacaaatacttatattggggacctgtatgtcaagccctaggaagagtgccaggtcatcatctgggaaaggaaatattaggagtattggggtgtgaatagtactgcacagaattccaattcatttcaaaatatatttcacagattatcacaaaccaggaaatgagttgtgtgtaattttctttgtttttgagacagaattttactcttcttgtccaggctggagtgcaatggctcgatctcggctcacctcaacctccacctccccgaaacctctgcctcccaggttcaagtgattctcttgcctcagcctcccgagtagctgagattataggcatgtgccaccacacctggctaattttgtatttttagtagagacggggattc[143 bp omitted]agtgcagtggcatgatcccggctcacttcaacctccgcctcccgggttcaagcgattcttgtgcctcagcctcctgagtagctgggaccacaggcatgggccatgacactcagctaatttttgtattttcagtagacacaaagtttcaccatgttggccaggctggtctcaaactctgggcctcaagtgatctgcctgccttgacttcccaaagtgttgggtacaggcatgagacacggcacccagccagttgtatgtagttttaatcaaacaactccccaaattcaatgaagacaccaattgtattcatatcctgccctactagtcacccaagtgaatatcatcatccaataatgaaatacctctaaaacaaccacatgctggagggctgggggttaaaggaaggaaatatatgatttttactatttgctttttttttttttttttttttgagatggtcttgctctgtcgcccaggctggagtgcagtggtacaatcatggcactgcagcctcgacctccccgggctcagatgatcctccctccccagcttccaaagtagctgggattgcatgcgcacaccaccatgcctggctaatttttgtatttctttgtagaggccacgttctgccatgttgcctgggttggtttcaaactcctgggctgaaatgatccacctgtcccaaccttgtgaagcgctaggattacaggtgtgagccaccaggcctggcctgttttattgtttaatactttaacatttgaggcttccaattgcaagcaacagtctcagcctttggtaattaagccaaaaaggtaggtagctcacagaatgattgggagggatagaaatccaggctccaggctaggcttctaggtgctatgcccaaaattatgccatgggacaggtatagtgagtaagtcacctgcctctcctgctggcacaagaacaatgggaattgccactgttgccacgctgatgtgctgtctgcacctgatacacgatatatgagcaactactcttgcctgtgaaagccggaacctctgcctccacccttgcacgcaagatgaattcatgtgaaaccttaagttgatcaattttgaaatatcttgatatgagtttcattggtgaaacttagacacatgacttagtcacgtgccctacttcaaaagagcccaaggaactgaagaaatttcctagagctggcaaaaatgttcaaaagggacagggagtggtggctcatgcctatgttcccaacattttgagaggatgaggtaggaggatcgcttgagcccaggagtctgaggctgcagtgagctgtgacagcaccactgcactcaagcctggacaatggagtgagcccttgtctcaaaaaaattttaaaaatgttcaaaaggtactgagtggccagaaaaacagaacaaatgcctcctatcttctatcttttgacatctcttcagtaacatacacctttcttccataatcaaatttaacatcttcatctacaacaaaatggtcttgccccatatactgccactacctcactaacgtaaatgcaaagttcctccaagtgtcataagttactgtgaccattttctttcttttctttttgacatggagtctcgctctgtcgcctaggctggagtgcagtggcgcaatcctggcttactgcaacctctgcctcccgggttcaagcaattctcctgccttagcctcctgaatagctgggattacaggtgtgcgccaccatgcccagctaatttttgtatttttagtagagacagggtttcaccatgttggtcaagctggtctcgaactcctgaccttgtgatccacccgcctcggcctcccagcttttagtttaattaggtatcacttgtctatttttgtttttgctgcaattgcttttttggaaacttagccaaaaattccttaccaagtccaatgttgagaagagtatttcctaggttgtcttcctggatttttatagtttgaggtcttatatttaaatctttaatccattttgagttaatttttgtatatggtgaaaggtagggggctcagactcaatcttctgcacatggctggccagttatcccagaatcatttattgaatagggagtcatttccccattgctcgttttttttgactttgtcgaagatcagatggttgtaggtgtgtggctttatttctgggttctctaacctgttccattagtctatgtgtctgtttttgtaccagtactataacattttggttactgtagcctagcagtatagtttgaagttgcatatatgatgcccatcagcagtggactggataaagaaaatgtggtacatatacaccatggaatactacatagccttagaaaacagacaaacaaaccaaaaaacccaaaaaacctgtcctttgcagccacatggatgcagctgaagtccattatccgaaatgaattaatgcagcatcagaaaaccaaatacctcatgttctcacttataagtgggagctaaacattgagtacacatggacacagagatgggaacaacagacactggggcctgcttgagtgggaagggtggcatgaggctatgggtcaaaaaactgttgggtactgtggtcactacctgggtgacgatatcatttgtacaccaaaccccagtgacatgcaatttacccatgtaacaagctgcacatatcccttaaacctaaaaatagaaaaaactaacaataaataaatgaggtatgtctaattgttgaatgctatgaaaggtaaccaatggagatattgaacatcgtgagagtggcctggcgctgtggctcacacctgtaatcccagcactttgggaggctgaggtgggcggatcacgaggtcaggagttcgagaccagcatggccaagatggtgaaccctcgtctctactaaaaatacaaaaattagccggttgtggtggtacgtgcctgtaatcccagttactcaggaggctgaggcaggagaatcacttgaacccaggaggcggaggttgcaatgagccgagatggcaccactgcactctagcctgggtgacagagcaagagtatgtctcaaaaaacaaaacaaaaaaaaggaaaatagtgagagcaccatatctggaaagtggtccaggcactggggtgaggggtgagtgtcagccaagtcatcagctatcagaacaggaagtcatcaggtaatacatcaagtggatatattgagaaggagcaggatctacctattatataacacagagataaccactcagatatatagattagaaatagtttagaaaatttaaacatctgattattcagggagtagacctgggagcattggagaaatgatggggagtagactgcatggaaagctctttcttagtatgtgatttttcaattatgcacataggtttcttacataacatgtaaaattcaattaaagaagaaacaaagttgtgttctggggtcccaaaggttcagtgattaattagaagaactcacaaaactgagtcaagctgttattctcatggttatggtttattacaacaaaaagatgcagattaaagtcagcagcagcaaaaggtgcgtagggcagagaccaggagagaccaagcgcaagcttccagttgccctctcccagcggcatcatgtgtacagtgcttaattcacccagcgatacatggcagaaagtacagaaaatactccccagcaaaaagcttacctgagccttggtgttgagggttttactggaggttggtcacatggacaagagcacccatttggatgaccttagtttctctgtctccacccttcccaaggtcaagctgacactgcatggtccagggtccccacaataaatcacattgttaactcctacagaggcaggatattccaaggacttagaggttatttcctgggagatggactagagtcaaacctttctttggagtgtgcggggtttggacaattcaggcctacttagtttccttgactgcacacaagtgatagtgagtatgtaggaaatgaatagtctcatatattgctggtgaaagtatagtgttgtataaacctctggaaagaaatcgagtgtgtagtgcataaacattatatttggtttgtttttgttcttgtctgagacagagtctcactctgtcacccacgctggagtgcagtggtatgatcacaactcactgcagcctcaacctcctgggctccagctatcctcccacctcagtctcctgagtagctgggaccacaggcacgtgccaccacacccagctaatttttgtgtttttggtacaggcagggtttcaccatgttgcccaggctggtttcaaactcctgggttcaaacaatcctctacctcagctccccaaagtgctaggaatacaggagtgagccactgcacccaacctatatttgtatatacattaaattgtatatgctaagccgggcacggtggcttactcctgtaattccagcactttgggaggccaaggtgagtggatcacttaaggtcaggagttcgcgaccagcctggccaacatggtgaaaacccatctccactaaaaagacaaagttagctggacatggtggcagatgcctgtattcccagctacttgggaggctgaggcaggagaatcacttgaacccaagaggtggaggttgcagtgagccgagatgacaccactgcactccagcctgggtgacagactgaaattccatctcaaaaaataacaaaaaattgtatatattattgtatgtgtgtgtatatattaagttgtatatacacatattaaatatatatacatatattacattttatacacatacatttgtttcctcatgcaatttgtttcagcagaagtaaaaattaaagatataagtaaaagaatatttacagaagcattatttttggtggcaaaagtactttaatatctttaaatgctcatataatggaagatagtttaactcttacaaagaacgagttagttggccgggcgcggtggctcacgcctgtaatcccagttttttgggaggccgaggcgggcggatcacttggggtcagaagttcgagaccggcttagccaacgtgatgaaaccctgtctctactgaaaatacaaaaattagacgggcgtgatggcatgcgcctgtaatcccagctacccggaggctgaggcgggagaatggcttgaatccgggaggcggaagttgcggtgagccgagatggcgccactgcactccagcctgggtgacagagtgagactccctcaaaaaaaaaaaaaaaaaaagtttgtggaaccaattccaatccagtccaggggagcacacactggcgaccaacatccccgctcaggtcccttcagggtcgagagagtgcgcctggaacagactgggaaactccagcaggcaaagtaatgtgccaggaataaagacaccgcctgacacattctccatgttccttacacccaccacgcttccatccggctccaactctgtcctctccccaggagcctcagattaaaatactgcaaggaagacaccgattctcaaagtcacaggcctaggaatctgagctacaaagaaaaatgagcccctgctcccccaactcccccctactcccctcagccccactgccctgcacctgccccctcctccgtaatttgaactgtcctcccagaagctggagagacggcccgcctgtgaggaaatagaggaccagcatgcggcaaatgcctgggttaggtaggagcagacggcgagattagcgcagggatgtaagaaacaagtggctctcagaccaaagaagactccgcggcagacggcacactaggccttcatagaggcgtgcgctggacaggagctcgccagttaccgaaagaattgtctgagaaaggctctgatctgacccgaaaggcccttggttcccacggcaacgcctcagcgtctggcagtaacaggctctgtgcccgggctctctggatctgcaggtcccgcctccgccagcctctcacagcccggaggcacctcccattggcgcctgacgggttggttagggcagcttctcttccggctgtgacaaatccagcctgaggagcgctcctgtgtctttcttagttgtttcttcccgcccacctgcccctcaaagccacaacccacttgcacgccaccgtgtggacaccttaaagcgaccttctagctctgaaccccgctgagggaatggtcaccttcgctcctattagatggcttggcccaaaggacctagcgacggcccagacaaaaatttcttcctacaagctccatgtgtctgtggtctctaagactcaaaaacaaacccaaaagaaaaagccaacccccaccccccgcaaaaaacaaacaaacaaaaacccccaaaacgccgccaacccacctttcacgagaggagtccttgagaagagcctctccagccaggaccaggtaagggaatctgtgcacttggccagacccagaacacacagtggcagggacctgacagccacactcttaccccatagaatctccaccactgacacacagatcaggatgcgtcaccatgagagatgacaccgcaaatctggctctcacggattgattccatactgtctcatcgatcccacacacatcccatcactgacaccagattccctcatcactgaccctacatacccacaatcattgattccatggacctcatcactatcccaaagaccacctatcagtaatctacagaccctcctctgtcaccccggggacctcacagattccccatccccgattccaggatctatagaacctcatctcttacccccacagacctattaataagagggtacattcatggaagactgtgttgaccattttacacacccactgcatgtgtgtatgtgtgtgtgtgcgcgctgattaatggacttaggtaaactttagcgttttggtaggcaatgcagtttttcaatgccttttctttttctttctttttcttaacatctttaaaggccttaccccagtaagtgtggattgcaattcattaatgcctatcctttattgagtccttgtcatgcatatttattaataataattcataattcttacaactcagagacaccagagactcacatgagaagaatggctgtggatttttatttacttatttattcattttggtttctgtagattataaaagtcattcatttgcatcaagtcaccaagtgtatactttgttttctaaaaaaaaattctaattacaaaaaaattgtttttagacagggtctcactctgtcacccaggctggagtgcagtggtataatcatggccaccattgcctcgacatcctgggctcaagtgatcctcccacctgagcctacctagtagctgagaccacaggcatgtaccaatacttccacctaattaaaaaaaaattttttttttgtagatatgtgggtctcactatgttgcagagactggccttgaactcctgggctcaactgatcctcccaccttggcctcccagtgttgagattacaggtgtga[140 bp omitted]cggtgaaaccccgtctctactaaaaatacaaaaaattagccgggcgaggtggcgggcgcctgtagtcccagctactcgggaggctgaggcaggagaatggcgtgaaccccagggggcggagcctgcagtgagccgagattgcgccactgcactccagcctgggcgacagcgagactccgtctcaaaaaaaaaaaaaaaaaaagagtaactttgggacctaatgtaaaatttccactgagatgatgcgtcagaaattaaggtagaataagatggtcctagggcatctgaaacaacggaaactcaatcttgggccaggcgcggtggctcacgcctgtaatcccagcaattgggagaccaacgtggttgactcacttgaggtcagaagttcgagaccagtctagccaacatggtgaaacactctctctactaaaaatacaaaaattagccaagattgcgccactgcactccagtctgggcaacagagggagactctgtctcaaaaaaaaaaaaaaaagaagaagaagaagaagaaacaaaatcttaatttcttcatcaagtgtaaaactgtggactggactctggaggaataatacataaaaagacacacaggcaattttttttttaagttttattgagaaatattaataacataccacagaagccacccattgaaactgtaaaattcaacggttttcagtatatttgcacagttgtgcaaacagcaccacaataaattttagatcattttcattaccctgaagaaaaccgcatatccctccatttccccccaactcccctaaccctgggccaccaccaatgtactttgtttctatgtattggtctattttggacattttatttaaatggaattacaaaacgtggtctttcgtgactggcttctttcacttagcatcatattttcaaggtttactcaatgtttcatgtgcagagggggcactttatgtaaggataaacctaggagggaggtgcttattgattttgaaacttcactccaatattgtaaaagggaaatgattggtttcaaatagaggaaaaacctattcgggctaaaatcctcccttttcgccagtttgtaatgtggggttttattgcgaagaatggcaaggtttttatgcatattttctgcaaattctccctgtgtttggggaacagtcacagaatgtggaggtgtgggcttctggactctgtggctggagattcaagtccaggagaactcaggtcccaggttaggcagagaaaaacagtccaagagtgccgatagaactctttgaaatagaaaatttaaaatgtcccctcccagagagtcccagataaccacacaaaagaggagtttgctgagctggtccgtcgcgattgtccaataagatgcagacagactgggaaagaaaggagtttatttctgcaaccggttagacggagaagccaagtaactcaccagaccaactcaaagtttcaagtttttttctagtgcttatatacatcttaagctcaatgctatggtgggactgcacctacaagcagaaatgttgcattcaatcaacatctaatctttaactacggtctagggtctggaaagatttctctagagtcttggaaagtttctgaatcttaagacaggcccaggtgaatgtgtaagaatactattattattcgatcagactttagggtctgagaggacccaggcggggtcttaatgggttcgttttcgcattccatccctgatactcaggcaccagtttctcaatttctttaacgtttaacttatgcattcatcaaaattatagtaaagtgttaatggaaactgttctggttgctaatggaaacctggcctgccacactgccgaactgaagcccactgcagaacactgaaaatgcctgcaaacactgactttactgacaactcttaaattacagaaaatcaagttcatgctgcctctccgatctgtcctacggaattgctagttacaaacgtgcacattgtcctaggttcggttttgcaaagatggagcccttcagcgaaagcatttgtttgatttcatgcattaatgtttcctctatccatttcctttttacttatttatttaaagacggagtttcccttactgcaacctccgcctcccgggttcaagtgattctcctgcctcagcctcccaaataggtaggattacaggcatgcgccgccatgccccgctaatttttgtttttgtttttttctttttttttttcttttgagacggagtttcactcttgttgcccaggctggagtgcaatggcgcgcgcgatcttggctcaccgcaacctccgtctcccgggttcaagcgattcttctgcctcagcctcccgagtagctggattacaggcatgcgccaccaccccggctaattttgtatttttagtagagacggggtttctccatg[140 bp omitted]caggatagtctcgaactcctgagctcaggcaatccagccgcctcggccgcccaaagtgctgcgattacaggcgtgagccaccgcgcccggcctattttattttattttaagacggagtctcactctgtcgcccaggctggagcgcaggggcgggatctcggctcactgcaacctccgcctctccggctcactgcaacctccggctcactgcaacctccaactctccaactctccaactctccaactctccaactctccaactctccggttcacgcgattcttgtgcctccgcctcccgactaggtgggattacaggcgcccgccagcacgcctggctaatttttgtatttttagtacagacgggggtttcatcatgttggcggccggactgttctctaactcctgacctcaagtaatcggcccgcctcggcctcccaaagtgctggaactacaggcgtgagccaccgcgcccggccccatttcctttattttattttactatgttcagacggagtttcgctcttgctgtccaagctggaatgcagtggcgcgatctcggctcaccgcaacctctacctcccaggttcaagcgattctcctgcatcaacctccggagtagctgggattacaggcgcacgccaccacgcccgactacatttcctttattttatttttatactttactagcctgtttgttgatcacaagactggcggtgcacaaggttgggtctcggtgttcaccgggcggtgggcgtgggcgaggtgggagggtctccagcgcctggtgctaatctccaagaaagtgcaggaaacagcaccaaacgtgattgcaaagttttggtttggcgcggcgggtaggcgttccagcgcagaaatgcgcaggaaagtttctgctgtgcttgtaggaaggtcggccacaagcacttcttttgttttttgaaaccgagtttcgctctgtcgcccaggcaggagtgcagtggcgtgatatccgctcactgcaagctccgcctcccgggttcacgccattctgcggcctcagcttcccgagtagctgggactataggcgcccgccaccacgtctggttaatttttcgtatttttagtagagacggggtttcaccg[134 bp omitted]cctgcatatccattggctgaaagctccgtctattttagggtgactgagagcgtctcttccttctgtgttgcctggaaacggactgttcgcctagtaacatctgatcacgtttcccattggtcaccgtttccggaagcccgctctcccgtttccggaatccccgcaggcgctgggtctgcagatggcgtccaggtacacagtggcgagtgtgattccgcagtcttgggctgtttggccaagcgcccgccggacatggtacgccgaagggtcatcggcgtggagtcctcgctttcagcgtccgcggctgggaaatcggccatcgctacggcgggaactgggactcgggctgcgtcccggcccttccacatcggtccaccgcactcgtgggcgcccgcattggtgctgacataatttcctgacctctgacccgtattgtctcgcgattaaaggtaaaaaacggggctttttcatcccactggggtaaaacgcccttttatttctagccaggtgttctgttgcagaacgcctcgaagggagggagtgaccggcaggttgaggtttattaaataaaatacattcctggtttatattatgtttataataaagcaccccaccctttaaaaaatctcacgttttgccagttgcattatttagtggactgtctctgataaggacagccagttaaaatggcattttgttgttgttgctaattaaaccaatttttagttttggtggttttcctaacagcagcaacttctcaggctttataaaatcatatttcttgtgggaaatttctgtgaaaggcgcagcgagttagtttggaattgttttaaaggaagtaagttcctggttttgatatcttagtagtagtattttccccagtgtctttgaaatcttatttttggagcacgtatgtagagtaacttttgtgaaagaaacaacttttattttttattattatttttttttgagacggaatttcgctctcgttgcccaggctggagtgcaatggtgcaatctctgctcactgcaacctccgcctcccgggttgaagcgattctcctgcctcagcctcacgagtagctgggattataggcatgtgccaccacgtccagctaattttgtatttttagtagagatggggtttctttatgttggtcaagctggtctcgaactcccgacctggggtgatctgcccgcctcggcctcccagagtgctgggattacaggtgtgatccaccgcacctggctgatttcatatatatatcttcctaaatcctttaaaaagttagtggatctcttacttttgtaggatttatttcatagtgtgaatgagacacctgtaggctccaggtctctgtcttcatgaggtgtgaagattcagtgctttataaaacagtccccacattcttcaaaggccttgttcttaattctcagcacgcttgtgcttctgacattgttactaaaattaagctaagtttttctggttatgtgagagctgtggaaatgtccagcgttagccactaatgtttctccttgatatttctccgtatcttaatactgactctcaatccattactcagatgggtgtccttttcctggatgtctggaaactaagcctggctatccctctgacctccctgccgagctaccatttttttcctctctcttttcttgtctacacttgagttggtaacctcagctctttcatgagcaaccttgatgcctttgactccttctgagtttattacccacagttccatcagccaagtttaggggcccatgagaagggctcgtgtaaattttcacattcctctaaccaaaatgtagtgtttccttccatcttgaatataggctgtagacccctcgggtatggggtattgttggcagtgagaccacagcagtttttatgtcatctgacagcatctacaaatagccttcatggttgtcactgctttccaagacatttccaagtaacagttcccagtgatgatttactactcgctattgttacttaatgtgttaaggtggctgtcataggcactattactatgtcagaaattacaccaaaatttagtggctcaaacaatcattatgttatgtggattctcatgctcacagtcaggatttcagatatggcacaagggtagcccacttgtctctgttccatgatgtctggcctcagcacggaagactcaacggctggggtctgcaaccatttggaggcttgttcccttgtggggaaaacaaagagagatcagactgttaccgtgtctgtgtagaaagaagtagacataagagactccattttgttctgtactaagaaaatttcttcggccttgagatgctgttaatctgtaaccctagccccaaccctgtgctcccaagagacttgtgctgtgttgactcaaggtttaatggatttagggctatgcaggatgtgttttgttaaaaaaaagtgcttgaaggcagtatgcttgttaaaagtcatcaccgttctctaatctcaagtacccagggacacaatacaaagatttctcctcatgcgatagcctgagatatggcctcctgggaagggaaagacctgaccatcccccagcctgacacccataaagggtctgtgctgaggaggattagtaagaggaaggcctctttgtatctttgcagttgagatacgaggaaggcgtctgtctcctgctggtccctgggaatagaatgtctcagtgtaaaacctgattgtatgttccatttactgagataggagaaaaccaccttagggctggaggtgagacttgctggcggcaatagtgctctttaatgcactgagatgtttgtatacgtgcacatcaaggcacagcaccttttcttaaccttgtttatgacacggagacctttgttcacatgttttcctgctgaccctctccccactattaccttattgttctgccacatctccctgtctgagatggtagagataatgatcaataaatactgagggaactcagagaccggtgccagtgcaggtcccctggtcccacttttctttgtctatccttttttttttttttgagatggagtctcaccctgtcgcccaggctggaatgcagtggtgcaatctcggctcactgcaacctccgcctcccgggttcaagcgattctcctgccccagcctcccaagtagctgggattacaggcgcgcaccactatgcccagctaatttttgtatttttagtagagacggggtttcacta[137 bp omitted]tctcgtcccacctgacgagaaacacccataggtgtggagggggcaggcaccccttcagttgggcaaatggtctaatatttctttttttttttttttgaaacagagtcttagtctgtctcccatgctggagttctgtggcaccgtgtcagctcactgcaacctccatgtcctgggttcaagcaattctcttgcctcagcctccagagtagctgggattacaggcgcccaccacgcctggctaactttttaatatttttagtagagacggtttcaccatgttggccaggctggtctcgaactcctgacctcaggtgatctgcccgcctaggcctcccaaagtgctggaattacaggtgggcgcttggccaaggggctgatatttcttaagggcttcccctgagaaagaagaagccaaacctactcaggcaaatcttgtttatttattcttctaggtccagatttggaacaaatctctctagagattgaacaggtaaggctcacctttcaataattacaccaagaaaggcctagctgatgacttaagctatggttttgggcagcacgagagtggtcaggtggacagtagggaagtctatacaacccaaagggaaaagagaaaaggcccatgagaaatcagggcaaattgccacagtgtgtttttcttgatggtgtcactgaaatgtgggttaccttcccactgtgtcccccaaaggacatgaggccacagactgcagtgcccgtgagcagaggagctgtagggacggtggtttgatcgctccattcaaatgcacaccccggtgcctgtgcgtctcttctgatgcagggccccagtgggtaagctctgtgcttctccacacagtggattaggagtggaaacattctgtctgtttagcgcttgatggtttggtggtgacctcatgtcatggtgattagagccagtgatcctaacagtttaaaattgttgagcttgtgggtaggtatttgggagatagtatatgtgttacctagtgtttgtcatccgcagtggttttgttactttttgcataaactgcggagaaagtttactaactgcagatagtagagaaattaccagtcactctaaaatcctcccatttcttggtctagagctgcgcctggatccctcagcagtgaggagacctgaagaccagaggaaacacagcaagtaggccctttaaaccactcacctgtgttgtcttccaatttattctgttttattttgtttccatcattttaaggggttaaaatcatcttgttcagacctcagcatataaaatgacccatctgtagacctcaggctccaaccataccccaagagttgtctggttttgtttaaattactgccaggtttcaactgcagatatccctggaaggaatattccagattccctgagtagtttccaggttaaagtcttataggcttcttctgttttgaggaggagttcctgtcagagaaaagcctgatttggatttttaactttaatgcctgtgaaatgctataaaaaataattttctacccctaacattaaagtactgttagtgagaaattaaaattccctcaggaggattaaactgccatttcagttacctgaattccaaatgttttggttgttagaattttctttaatgttcatgaggaagtgttttatattttctatcaagattaattctctttttttttttttttagacggagccttgctctgttgcccaggctggtgtgtagtgatctcagctcactgcaagctccaccttccgggttcacaccattctcccacctcaacccccggagtagctggaactacagcctcctgccaccacgcctggctaattttttttttgtatttttagtagagacggggtttcaccatgttagctaggatggtctcgatctgctgacctcgtgatccacccgcctcggcctctcaaagtgctgggattaaaggcgtaagccactgcgcctggctgttttttcatttctattatgatttgtcctgtggaatgtcagtgacttagcggtatttttatcacacgtttataaagctgaatagttttgtatgtcagctcagcacccttagtgtcagccatgctagtctcctgctgtgcatagatcgaggcctgtccatacccgaatctcctgggttcccactgtcagcacctgaaggtacccaccagatgtgtctgtcacttccctacatccacctctattgtggttctcatgtttctgcctccctagagaccatttctctgtagagcagcgctttcgaatagaaatacaatgccagacacataagttgttttagattttctagtagtcactttagaaaagttaaaaagaaacaggtgaaattaatgttttatttcacctaaaatgttagcattatccaaaatatcacttcaacatcttatcaaaataaaattattaatgagattggttaccgttccgataaataggtgaactgagagcatacacagtagtattctgttctaatttctgcttcactgtgagtgtcttgacatagtcttaaaagagtattgctgtgaaatattatacatgtaactcataacctctacaattctgcagttgtaattggttgtcttacctaataatcagttgctttgcttcataatatttaaattggcatctctattttccaaaaggcataaatactagtatagttttttagttaagccaggagaaagttcactttatttacataacttatacgtaaaaatttaataaatctccctgcttcttttcttttgcatcataacaaccactgaaaataatatttctatggcagttgggggtaaatggacaatagcttttgtgaccagaggtgaatggcccagggtctccagcactccaggtcccactgagcctgccccacagctgagggcatcggtatttccacacacctataatgtacagtgccccagaacagagatcggatgctctgctttattcagatggggtgttgagagtattgtcattgtaattgaattagtaagtaagtatttatacactgttaaaatctggttggatttgtgtcccttcacaaaacaaattgcttaaatgaaaccacagagttaacataattgactacatctgcttctatgagctgctgttctaacatttaactagaatctaatttgaaattagtcaataaaaagtttattcaactgaattatatttagactttttgttgttgttgttgttttgagatggagttttgctcttgtagcccaggctggagtgcaatggcgcgatcttggctcactgcaacctccttctcccgggttcaggcgattctcctgcctcaacctcccgagtaggtgggattactggtgcctgccaccacgcccagcgtgaagcactgcacccggccttcatagattattttactttattttagttacttatttttatgactttattgttataaaaatgcttgtttttaaaaaaaatcaaccagtataacaaagaacaaagaagataatcaacaagcattcccacctccatgatttagaaataactgtcatcaatacaggaaaataccatgccattctttctcctctaggcacatggacagacagatagaaggatgggaaaatagatagatggtccaggcacaatggctcacgcctgtaatctcagcactttgggaggccaaggcgtgtggattacctgaggtcaggagtttgagaccagcctagccaacatggtgaaaccccatctctacttataatacccaaaaaaaaaaaaaaaaaattggccaggaatggtggtgggctcctgtaatcccagctactcaggaggctgaggcaggagaatcacttgaacccaggaggtggaggttgcagtgagccgagattatgccattgcactccatcctggacaacagagtgagactccttctcaaaaaaaaaaaaaaaaaaaaaaagaacagttgatgaaggatggatagactaaaacaatgctgcattaatgaggctacgatagtgcgtatttgtataaaaagcattaatttgcatttgttggcattttgaagctctgttgttggatgcatacacatttagtatctatatgtcgttatgatttgtaaatcatgtaatgcgtctctttacataatgatttttaaattattttgtaatgtttctcattacgttatgtaatgcccttattaactttccttggaaatcttttttacccgttatccatacaaccactcttgctttcttaatactgatgttagcatgatataccttttttcttttgttcgttttttattttaactgtcaacttacctatgctgtgtttgaagtgaggttcttgtacgtggcatgtagttgggttatgttttattttatttaaactgccatctctgtcctttacatcaaaggtaaattgatgttcttagaccacgtacctttaaagtaattcttgatgtgttaaagcttaattctgccattttattatttgttttctgtttgtttcctgtttccctgttctagtcttccactggatacttgatcacttttaaaattccatcttgtttaatttatactgtatttgagtatatcacttacatagttcttttggtggttgctctaggtattacagtatatatctataacttagcctattgctatccacatttaagtacttgcagtggagcattgaaaacttactttcatttaggtctttaccctctctaccttttagatataattgtttccaatgtttcctttttcatattgagcattccaacatatgcttttataatttttgcttgagtcatcaaatatgatttcagaaattcataagaaggagattcttacggctttgtggccctagatatactgcctgtagtatactgaccagtggctccagacctcttttctttggtgggagagggtctggcacttgggtgggccttgccaaaattttctttctctgttgttgaccatcatctccctctgaagtttactgcctgacctgtttctgtgtttggttactccaggtgaacttgtgctatttctgttgtctttaggttgagagtggtagaacttttttttaacttcattctatcatctttaccccaaagtcttacatttttaataaaattaaaagccaccatttttggtcctttgtcagtgacagctatctaaagaaagacattagcagctttttagatatttaaggaagtttctgtcattctttggttgtcatatctttaggaaacatttttttccctaaattactccaaattaaattaatcctacagttggtctaatttaattttttttttttttttttttgagacagggtctcattctgtaacccaggctgaagtgtaggggtggaatcataggttattgcagcctcaaactcctaggctcaagagatcctcccacctcagcctcccaagtaactggaactgcaggtgtgcaccgccatgcctagctaatttaaaaatttttttgcagaggtggggttgggtctcactatgttgcccaagctggtctcaaatacttgagcacgagtgattctgttaccctggcttcccaaagtgccgggattacaggtatgagccaccatgcctggcccagttacttgctttttaaatagctcaaaagtttttcatccttttaaccaaagttgccaaatctaaagcattattccttttggtcatcaagtagaggaatggatgaatatatttcagtttgcttattactaaaatatgttagtaatagcatattttattcaaatcactgcatattagctctgtcttattttccattttcatgacaaacacacccaaagctcagctcactgtatttactttcttttcatgatactgtttgctaagttttttctgtttgcttcaccatattttgaacaat[137 bp omitted]agaccatcctggctaacacggtgaaacctcgtctctactaaaaaaaatacaaaaaattagccgggcatggtggcaggtgcctatagtcccagctactcggaggctgaggcaggagaatggcgtgaaccctggaggcggagcttgcggtgagccgagatggtgccactgcactccagcctgggcaacagagcaagactgtgtctcaagaaaaaaaaaaaatagtttgtgttttcaattgtcttatttagacaaactctgtagtttcaaagttatctttttcttgcctgatgcctttgatgtttgatgatgttaataatatactattttcaaagccaatttcttatttctacactgatattggaaaaagaataaagtgatgaagtcaacaggtgttattaaaaaatgtgaataacaggaaaatgttttgttgtttgttttgttttgtctttgaagtctttcacagactagatttgaaggtttatgaaggatagggcaaaattttctaaggaaagttgcatcctatgacctcaggctgacttcaagtaagagtggatttgataaaggcattgtctttcttagagtatgtgcatcttggcagaggagcctggagaggcagtatagaaggattgttttagatgttggatctctgtaacctgcatttacattttgttgagccgttgtcatttgggggaaaacacgaaaaagaaaagatcattatcatgctactataatgcacatcacatagaattgcaatgatttgttggttgttcattccagtccaagaactgtgagtttctccagccaaaggtcttgtatttattgatctttctgtcccacaggcctaaaacagcagttggcccatggacagtttaataaatgtttgctgactaatagatagggtatctaaaatcttttccatggccttatctctggagattaaaattttccagcacttgtctataaaagatgtctatgcgtaactgtagggaagacattgtaatttctgaagaggaggagcaaaccgacaaggttattgtagcattgattataatgcatggtagcagtctattctcagacctttagatgcctatttacctgatgcactggcaccaatgcccccattttggtgtgccatcttcccttcaccacttgggacaacacagataataaaatcagctccaaaagctaacccatggtggatcccttcacaccagttcacggtagaaagtaacccccttgcttgtagaaaacattattattattattcttcagatggagttttgctttggtagcctaggctggagtgcaatggcgcgatctcggctcactgcaacctctgcctgatgggttcaaacgattctcctgcctcagccttccaagcagctgggattacaggcgcgcatcaccatgcccagcaaattttttgtatttttagtagagatagggtttcgctatgttggccaggctggtcttgaactcctgacctcaggtgatctgctcgcttcagcctcccaaagtcctgggattacaggcatgagccactgcacccggcctagaaaacatcattaaatagcaaacagtagcagtgtgcttggggattttaggattgattattttcaaatctctagaaaagctcaatgtattaccttaggctataatccctgggcagagtctcatctgttaatgggagctggtctaagggtccttccagctcccagattgatgatttcccaggttgatctgctccctgccacccacccatcctcggttttgtttgtttttacagagataatgtctcactatgttgcccaggctggtcttgaactcctggcctcaagtgatcctcctgccttggcctcccaaagtgctggagttcctgatgtaagccactgtgctcagcccatccttggctgttaaagtgtggaggtaaacagtagatgccaagttttcctccaggttagaagtggcagatgccccagtacagaataatgtccctaaccaggcctcccactgcatgaagaccttattttctggagcttaaacctggacaaaggtctgaccagtagcactatgttcatgaatatcaggtcaaaaatttaaaactgggactatccagaggaacctggtagctgcaagtgtagtctgcagtccaatggtcagctatgaaaacaggctacttgtactttctgtttgtcatggagtctgatgtaaaaattgatgacactttctaacttctggtgtgcttcccttccttgttcattttccataagtagcttcctccatccctcttcccaacaggccacagtcaattcaggacattttaaccatgaaaatgagtctctgtaagaggaatttagaggccaggcacggtggcccagcacttcaggaggttgaggccagcagatcacctgaggtcaggagttctagaccagactgaccaacatggtgaaaccctgtctctactaaacatacaaaattagccaggcatggtggcgggggtctgtagtcccagctacttggaaggctgaggcaggagaatcacttgaacccgggaggcggaggttgcagtgagctgagattatgcctgggcaagaaaagcaaaactccgtctcaaaaaaaaaaaaaaaaataaggaatttaaaaattaacatagaggaaggaataaaggggccagccccttaaaaatcccccaaacctctttaacaggagtttaggttataatataaatgtgttgagggtactttttgcctttgttgatgaaggactctagtgagattgtgctgatgatattgctgtacttggaatggactggtcctttcatttcctggatttgtctctttgttcttttgagttcaggcataacttatgttaatacactttgcagatactgtgtttttgacaaattgaaggttttggcaaccatgcgtggagcgtccatctgtgccacgtttctatcatcatgtggtcagttggtgactctgtcacattttgctaattcttacaatacttcaaattttccattattattactctgttatggtgatgtgtgataggtggtctttgaggtaactgttgtaactattttgggaggtcatgaaccaggaccctatatgatggcaaaattaattgataaacattgtatgtgttctgactgctcccctgcccagctatttctccatctttctctcctttgccctccttactccttgagactcaacaatattaaaattatttcaatgaataatcctccaatgccctcttagtgtgcaaattaaaggaagacacatgtctttcactttcagtcaaaaccaagaaacgattaggcttaatgaggaaggccatgttgaaaactgagacaggctgaaagctatacttcttgtgccaaagttagccaagttgtaagtgcaaagaaaaagttctcaaaggaaattagaagtgctactctggtgaaaacattcatgataagaaaacaaagccctaattactatggatattgcctagggtagtactccacgccctctgggcacacaatagatattatctgatgaactggaaaagagcaaaccagaagtggctttattttcccacttggactcccttggactgccttggactaatttttaagtcttggttggaaatcaccgagtaggttcataaggtgcatgacagaaataagctttatagtggcttactttcatttagttctggaagtttacctttgccttagttttggaagtaaattctagtttgtagaaccatttttgttgctctttcttcagtcttgatattccattctcttctgtccttcctaatggaatttatgcattcttttacaacaggtctgttggttataaattcccagagttttccttcatctgagaatgtctattttatgttccttcctgaaagatatttttactggctatagaattctgggttgaaagttcttttctttcagcacttttctcctacacagaaaaatgcactactcccttctggccttcatggtttctaactaggaatccaccagcattagaatcattgttatggtaaagtgatggttctcaactgcgaacatttccacacccaaacaagcatttggcaatgtctagagacattttgtgcttgtcacaactggaaattgctactggcatctagtgagaagaggctaggggtgctgctaaacatcctacaacgtacagcaaagcccaccagagcagagaattatttgacacaaaatgtcactagttccgaagctgagaaatagttacatatgtgtcatttctcactgagtgctctcaagagttttgtctttaattctctgaaatttggatttgatattctagacatggatttcattgcatttattctatttgggtttcattcatcttcttgaatgtgtaggtttacatcttttgccaaagttgggtagttttaaggccttctttcttcaaatatatttttagctctgctccttttctgtttctgggactctgatatgaatgtttgatcttttgttattatccctatggcccatgggcttccattctttttttcccccaattgattttatttcttgtctagaatggataatttctattgatgaatgttcaagtttattatttcctctgccatctccattctgttattgagccaatccagtaatttttaaaaatttacttgttgaatttttcatttccatttttttctatttggttctttgttatatcttctatttctttacttagtgccccctcctttaatttgatttaagagtgtttgcaattgcttggtgcattttaatgataggtctcttaaactcattgtcagtgaattattaatggcaaaaactgaaattacttttgcaccaaccaaatacagtatcagtgtaatcttggtgttggtatctgttctctttttctattaggtttagatttgcctggttttggtataatgaatatttttaattgtatccttgatattttgagtattaggttatgaggcccaggtttctattcattttgtgtttaactttttaagaaactgccacactgtttcccaaagtaattgtaccattttaatttccaccagcagtatgagcttcacctgcttcttatcttcactaacacttgctatacttagctttttaagtgctagccattatattaggcacatagtgttaacttattgtgttttaatttgcatttcacttgtgactaatcatatgtttatttgacatctgtatatcttctttgggttgttgaattttaaggtctttttatattcaagtctttgtcagatatatataagattagaaaatattttctcccagtctgtggctaatcttttccttctcttcacaaagtcggttaagagcaaaagctttcaattttgatgactaattaatttatttgttaaggacttgcagtttcagtaacatatataagaaatttttgcctactccaaggttctgaaagttttatagttttaagcatatgatacatttttagttaactttttttttttaagacagaatctcactctgtcacccaggctggagtgcagtggcgcgacctctgctcactgcaacctctgccttccaggttcaagagattctcctgcctcggcctcccaagtagcggggactacaagcttgcaccaccatgtccagctaatttttctttttttgtattttcagtagagatgaagtttcaccatgttggccaggctggtcacaaaccagccagcctcagctgatctgccagcctcagccccccaaaatgctggaattacaggtgtgtaccaccattcccagcatttagttaacgttttttgtaggtgctttgagctataaatcaatgtaaatttttaaacatatatataacaagttcttctagcattgtttgttaaaaagattacctcttctttaataaatttcctttgcaccactgtcacaaatcagttgtccatgtatgtgtgtttctcaactctctattttattccatgaataccacacagtcttgattactgtagctttataataagtcttaaattcaggtaacatatgttctccaactttttctttttttttttttgagtcggagtctccctctgtcatccagactagagtgcaatggcgtgatctcggctcacttcaacctccgactcccaggttcaagcaattctccctgcctcagcttcccaagtagctggaatttcaggtgcctgccagcagacctggctatttttgtattttttagtagagatgggttttgccatgttggctggtcttgaactcctgacctcaggtgatctgtccaccgcagcctaccaaagtgctgggattacaggcatgagccatcgcgcccagcctattttccaactttcagaattatttttaaaagttgttttcactaatctaggtcctttgcatgtccatatgtattttagaattgagttcccaatttctacaaaacaaaaagcctcctgaatattcaaaatgggatttcactgaatctataggtcaggttggaaagaattgacatattaatggtattgagtcttgtagtctctgaacatagtatatctctatttaggtcttttttaaagttctcccagaagtgtttttaatttttatactatacatcttgcacttcttttgccagatgcatcactatgtatttcatattgtttatggtgttataaatggcatttaaggttttaaggttcagattgttcatggctagttcatgcaaaatcatctgctttatatatattgatctttattttgcagtctcactaagctcatttagttctaatagtgttgtagataccttcagattttttttatatagacaatcatataatctgttaataaagatgattttacttcctttccaatctggatactttgtattctttcatttattgcactagctagaacttccagtataatgcttagtggaagtgtttagaccaggtatcctctttttgctgatctttggacttttaccattaagtatgatgttagcagtaggtttctcacacatactctttattggttaaggaaattcccagaatcccagaattcttttcctccttaactgaattattctccttaatgaatgctggatgcctagtaaattttttattttattttattttttaatttttatttatttttttgaactggagtctcgctctgtcgcccaggctggagtgcagtggtgcgatctcagctcactgcaacctctgtctcccgggttcaagtgattctcctgcctcagcctcctgagtagctgggattacagacctggcgggtttttttttttggtatttttagtagagacggggtttcaccatgttgatcaggctggtctcgaactcctgacctcaggtgatccacccgcctcagcctcccgaagtgctggaattacaggctcgagccaccgcacccagctgatgcctagtaattttttattttccactttggctactgggaaaaggaattattcctggacgtttttgagctctgtggattcttccctctaatcctttaaggtaattgtttttccctggcttcaggtagttttcacacacgcacgtgttgatgaatatttagctgaacttaaaggaagatcctctggagatttccgtgcagttctctcctcttcagtgttttgccttgtcaactcgggccactttggcctcatcagactcctcattctatctaaacactaggagaccaccaggctctgcctgagttactcctcccagcagtaatctggaaaaactaggaaaaatttatttctgtttttttcagggatcactgttcttcattggaaattgacattttagtatattcaatgtcttaaaaaccattgtttcacctatttcgtttagctttttagtatttacagatataagggtaaatctggtctgtttctccatttgatcagaagcagacatctgttcattctgttactggtgactttcagttaacagaataataaaattaatatgaatatgccacacttttctagttaaaatgttttgtctaggaaatattctttactgtgaggttataaaatgattctcagataaaaacaaggtaaaatcaaaggtgactactttccaaccttgctctctcccacctatagtttgtattttaatttttcttaagagacaggggttttgctatgttgcccaggttggacttgaactcctatgctcgagggatcctcctaccatgtcctcccaagtagctgggattacaggcgtgcaccaccacaccctgctcccacctattatttcatcattttgattaggtcttgg[135 bp omitted]gaaaccccatctctactaaaaatacaaaaactagctgggcatggtggcgcatgcctgtagtcccagcctctcgggaggctgaggcaggagaatctcttgaacccgggaggcggaggttgcagtgagccaagattgtgcaagcgcactccagcctggcaacagagtgaaactccatctcagtgtacttgtcaccttaaaaaagatctagtcaacatgaatgaaaatggcttattacaatacagttacataacaaaaaattatttttcacacaaattgtgaaattccatagatgacaataatttaggagggaactacctgttaaaggtgtgacttacaaaatgtgctaaatatgtgtacatatagtcaccatttcttaactcatgtaacactaaaagataccaagaacttcacttagaagaaattgataaagtaacttttcatcattcagaattacccatccaggctggtcacggtggctcacacctgtaatcctggcactttgggaggctgaggtgggcggatcacctgaggtcgggagctcgagaccagcctggccaacatggtgaaaccccatctctattgaaaatacaaaaattagccaggcatggtggagggtgcctgtaatcccaggtactcgggaggctgatgcaggagaatcatttgaacctggcaggcagagattgtaatgagccaagatcaccccactgcactccagcctgggcaactagagtgagactccacctcaaaaataaaaattatccatcctgctcagagcttaaacattataagcaaatatctactatattattctttgattaaatattgggttcatctatgtaagtttttttcatgtatcttcatgagtgaaatttttctggaatttgatgttcaagagctatcccatctacttttattataaaaatgttagtcttttagcatgccctggcaaattttccataggattttctattcttcagggtgtagcctgtacagttttctagtcttacatgtttgttttgttttgttttagacagggtcttgctccatcaccgactgcagtgcagtggggtgatcacagcttactgcagcctcaaactcctgggcccaagcagtcctctcacctcagcctcctgagtagctgggaccagaggcatgtgccaccacacctggctaatttattttttgcagagatgggggtctccctatgttgtccaggcaagtctggaactcctggttcaagtgatactcctgtctcaacctcccagagtgtttggattacaggcatgagccactgtgctcaacctcatcttacatgatacttttttctattttttgaactttttgggttgtttttgaaacttaatcatatttaataatgttttcctagaaaaaaaccgtacacatataaaaatcatgtctaacagagttcacatacttaatactaaaaaatatctccaaacatatagttatattccatttctccttataatatagtagaggcactgacaaagtctaatgaataatagttttcttcaaaggactagattttgatgaaaaacctgtatggttttttattccatgatttcagcttttcattaagcctttccattcattcatttggggtatttgttcttattctaccttgctgtgtaatcattatttaactcaataaatatttgaggccctacaacattataggcactgtcctaagtgctgtggatacagtgctgtggatacagtgatgaagagaaacaaactgccctcagtcttcttggttttatacacagagcaatttctattgataactgttttagttatttcacaggatttaaaatataggtctcattatcattctaaatactctgtaatttcactttttatttgctctttaatctaagaatggtttatatatagtagtaaatttcaaagaggtaagaatccatatggctatccatttgctagtttctgagttataactgtggtaaagaattatataacacttggctttagaaatttgttagagagaagttatttctgaatgtcttttaaaaaactgctgaacactcaacaaccccacttttactaaagtcataaggctttcttttataggtttttttgatgtagcatgtgaaattaatattcaaagctttcttcattgtattttactgattttttttcagaattaacattctgatgttcagtaagacataaatagagatgacatatttgtctataatcattatagtcttaaaagtcctcctctcataaaatggcttaataccaatacaaatgacagtcactaagtcatgtaaatctcaaatcattcaacccttataatctaatgaatacgattaaacagacatagatttaagatactttccaaaaaaaaaaaatagaggcaggatgtattgaaacaagacatgccaaataaattgtatgacatagttcaaggcttttctagattaattacatgatttttgtggaaatacaacagaattttgctaatgatgaaagatttccaaaatgaattatatataaattcttgtgggtttttgtttttgagatggagtcttgttctatcacccaggctggagtgcagtgatgtgatcttggctcactgcaacctccacctcccaggttcaaggaattctcatgcctcggcctcccgagtagctgggactacaggcgtgtgctaccacgcccggctaatttttgtatatttagtagagacagggtttcaccatgttggtcaggctggtctcgaacccctgacctcaggtgatccacccacctctgtttcccaaagtgctaggataacaggtgtgagccaccatgcttggccaaattatatataaattctttatgcaacatctctgatgagaatgttttgagaatgattcaaaaagaattcatgctatctcataaaattttaccctgatattctgcaattgataactgatcagtaatttctttcctatattgattgcatgatgaattctctgctgctgctgctgctgctgctgctggatgtgtgctctgttaaaatgccttccaatattacttacatttgtggtgttcctcaagagaaaaaaataaatgacatcaattaatgagtcatgaataaagcccttcctacacttttatataatatttcacaagagtgaaatgaagtgagagcttgaagaaaatgctttctcaaaatctttaaattcataggatttctcaaaagtgtaaatattctggtgttgagcaaagtttgactcatgactaaaggtgttcccatagtctgtccattcacagagatttgcactattatgaattttttgttcagtaaaatatgaatggtgactaaagatgtggctacttttcttgcatccataaggttctgcatcagtatgaattttcttatgtcgtgtaagctgtgaaccccagataaaagatttcccacattctttacatacgtaaggttcctcaccagtatgcattctctgatgtcgagtaagttgtgaaccccagagaaaggcttttccacattcttcacattcatatggcctctttccagtatgaattttctggtgtcgattaagttctgaaccacgaaaaaaggtctttccacattccttacattcatagtttctctcaccagtatgaattttctgatgtcgattaaactctgagccatgaagaaaggtctttccacattccttacattcataggatttcctctcattgtgaattttctcatgttgagcaagatacgaagcccaagtaaaagtcttcccgcattgcttacattcataaggtttcctgccagtatgaattcgctgatgtcgagcaaggtgtgagctccaaatataggctttcccacatttctcacatttataaggtttcctaccaacatgaacattctgatgttgagcaagatttgaaccacgaataaaggcttttccacattccttacactcatgagatttctcaccagtatgaattctctgatgctgagttaggtgtgatccacgagtaaaagctttcccacactccttacattcataaggtttttcaccagtgtgaattctctgatgtttaataagatgtgatcgctgactaaaggcctttctacattcattacattcatagggtttttcaccagtatgaattctctgatgtcgagtaagatctgagccacaactaaaggccttcccacattccttacattcataagatttctcaccagtatgaattcgcttatggacactaagttgtgaatgaaatctaaaggctttcccacaatccttacatttaaaaggtttctcaccggtatgaattctcttatgaccagtaagactcgaacgtaaactaaaagacttcccacattctttacattcatatgttttcttaacagtgtgaactgtctgatattgaataacttctgaatcaggaagaaaggtattcccacattctttatctccacagaatttctcacttgtgtgaattaactgatgttgagtatgatctgaaccagaaataaaggctttccccagttctttaaattcattcagtttgtctcctgtattaagtctctggtgtagattaaacactgtatgctggttaaaagtgggccttttttcacaggtgcgtatcacctgcttgaagcattcctcttgattatcttgaagtgtttgaaactgagtgttgccttcccagtcacctctaaaacataaacagtcaaggctgtggtttttacaaattctcattatttccaattgggctatttctctctcaaaaatgccattttttggtaataacttcttggtctgacacctcgactgcatgtctgaaaaataagaaggtaaaaacatcatacggttgtatgtacaaaaagcaatacaacttctaaaatagatatagaaaatcttgaagtaaagcatatgagaagtgaatggcttagaaaattctcaaatatgagcaatatgaaaaaaagggcaagaaataagtagaaatttaaaagaaataaaagttgagtcaagtgatgagaaatatgttttattttgatcatattcatctgaggagctcaataaaaaatgattatccaggtatcacctcaataacagaataataagtcataaaatacctacaagtttccaagtactatgatgaatgtcttatataattcagagcttaaaaataggaatgctgggaaatagcagaatatcagtctaatatgagggaagtaatctgatccagagttaccaaagtactaggatctcaatagcagggtatgctgcatttaggttaaaggagataattatgggtgatagttcagacagaaaaatagtttgaaggccaggtacagtgattcacacctttaatcccagcacttggaaaggctgaggcagatggattgcttgagcccagaagtttgagaccagcctaggcaacatggcaaaaacccatctctataaaaaattagccaggagtggtggtgcatgcctgtggtcctagctacctggaaggctgaggtggcagcatcacctgagcctaggagatgaggctgcagggagccatgatcacactaccacactccagcatgggtgacagagtgagaccctgtcttttttttttttttttttttaatactttgagttttagggtacatgtgcacaatgtgccagttagttacatatgtatacatgtgccatgctggtgtgctgcacccattaactcgtcatttagcattaggtgtatctcctaatgctatccctcccccctccccccactgaccctgtcttaacaacaacaaaaaaatagtttgagaaattttttcaagggagaaggagtctggcacaagctaagaataagtactcctctgtgactcttttttctaatgtatatatttaggatcgagtacaattgttatcagtttttcttgggagacagcaagtactctagcagtgactcaatgaattgaaaggcagtttagttacaaagtatgagcagtaatgtactgcaatggaaagatgacaaactgcagtttcagactctagttctgtttactaaaactactttttaggtgattggaaaattactgagcttgactgagctcttaatttttcatattataaaaaggaataaaacatcactttgcagaggtttgttgcaaggattgggaataatacgctatttctattaagtgcctgacacaggatacgtgttgaataatcagtagctgatgattattattagagaggaaaagctggagaatacggggaactagacaagtcagagtttgtctttttatttatttatttatttatttattttgagatggagtctcactctgtcgcccaggttggagtgcagtggcgcaatctcagctcactgcaacctccgcctcctgggttcaagcgattctcctgcctcagcctcccaagtagctgggattacaggcgcccacccccatgcccagctcatttttgtatttttagtagagatgggattttgccatgttgtccaggctggttttgaactcctgacctcaggtgatgattcacccgcctcggccttctaaaatgctgtgattacaggcatgagccaccgcgtctggctgggcttgtcttttatgacactgtgttcttctcgttgtacttcataagccctaacctttcttctgccacttcctcctcactgtgaccagaaactgttatcacctgttactctgattttcaactaagcagcctattaggtcttctcttaatgttccctgtatgcagaaatgtgtggccatgttccaatcacagaagagaacaaaaagtttcttaagagacaatatattcttgttaattcttttaaacctaaaataagaaaatccataaatgttggttaaaagaatgaactaataaggagaactaataaatgcaggcaatgtacaatcaaggagaagataggaaaaatgacaaaaattcaaaagggatgggtaaaataaaaaaatgaggttaaaaaaatttttttaactgaatgaagaattttacgaaaattaaattttaaaaaagggagatgagaaggaacttgatccaaatcatagataaaataagggccactggagaaaagaatggcacttacctttttgttacatgagtgaaaaatgagagcacaaaaatagagtggtatttggagtgaagagaaagttctttgagaaaaggttttgtctctatctaggcctcaggcccttattaaagtgttttttgtttgtttgtttgtttgttttgttttgtttttgagatggagtctgactgtactccagcccaggctagagtgcagtcatgcagtcttggctcactgcaacttctgcctccaaggttcaagcaattctcctgcctcagcctcccgagtagctgggactacaggtgtgtgtcaccacactggctagtttttgtatttttagtagagacgaggtttcaccatgttggccaggctggtctcgaactcctgacctcaggtggactgcctgcctcggcctcccaaagtgctgcaattacaggcgtgagccacggcacccagccagtttttgtttttgtttttgttttcccctgagacagagtctcactctgtcgaccagactgcagtgcagtggcacgatctcggctcactgcaacctctgcctccctggttcaacaattctcctgcctcagcctcccgagtaggtgggactacagctgcacgccgacatgcctggctaattttttgtatttttttgtttttgtttttgtttttgtttttttagtagaaatggggtttcaccatgttgcccaggctggtcttaaactcctgagctcaggcaacccaccaaagtgctaggattacaggcgggagccaccacacccggcccattttttggtcttaaggggatattccagaccaatatttcagaggtgttgctgcctcactgtgcagctgagctgttatccacaacaatggcctccttgtgcgtgttcagccctcactcacctgggcaaggtcctcttgtctcatccctcaaaatcttccagggctctttccctttctccaataaagagaacgcttctggctgataaatgcaaaaacctgcccagaagatgagaaacagcaaagaaccacattgtaaagattctaaaatttgcaactacttctttggttactaaggaagagaaacaattacaggcaggacaaaaataagtataaactatgggaaagatggaagtgcccactgatgataactattgccagatttacaaagcgcaaaccattttctaaaaaacaaaggtcagaagttaccctggacatttaaaagacaataaaaaaaatcacaatacagaaagcaggaatttctaaggaaaatgctgaatcttacccagtgagaccatgttgctgtagttctccaacatcacatctctatataaatccctctgttccaggtccaggcactcccactcctcctgagagaaatctacagccacatccctgaacatcatcaactgttggaaagaataattccaagtattaatggtgaaatttttaaaaataattataatccctatagatgaaaggggaaaggctggaaaggggcactgcagggagtggggcatatattgggcgaaaaactggagttggctgcctgtggtttcaggggaaatgacatgggaataagggtgacaaaagccaagtgtctacatgctctttttttttttttttttttttgagacaagagtctcgctctgtcgcccaggctggagtgcggtggtgcaatctctgatcactgcaagctccgcctcccgggttcacgccattctcctgcctcagcctcccaagtagctgggactacaggcgcccgctaccacgcccggcaaattttttgtattttttagtagagacggggtttctccgtgttagtcaggatggttttgatctcctgaccttgtgatccacccgcctcggcctcccaaagtgctgggattacaggtgtgagccacgacacccagcctacatgctccttttttttgttcttttacgagacagagtgttgctctgtcacccagaccggagtgcagtggtgcaatctcgactcactgcaacctctgcctcccaggttcaagtgattcttgtgccccagccaccctaacagctggggttacgtgtgtgcaccactgcgcctggctaattttttgtatttttagtagagacagggtttcgcaatgttggccaggctggtctcaaattcctgacctcaagtgatccacccaccttggcctcccaaagtcttaatgagccactgcacccggtaaaaactcctgttgctcagttaccacatctttatgatcttcaaatcacaaataccaaaacatcagaatggtagcccagaacagacatcataggagttttttgttgataccactgagaggctacaccagcctggaagaactagccccagatttattatgtgagaaaagttggaggttttgttagttgtaagcagtctttactgggcacaaacagacttgtgcatacagagcctttggcccaggtaactgtcctttgcttaagctactacttttagttgaattatctgttagtttaaactgagagaattctcaagagatacactccctggctgaatattattttctgtggaaaatgtgtagaatctccagactttgttaagcagctgacaatcagcaaattcagtgtcataagtgattactgtgaaagtcatcagatgagttttttgtcgataccactgagaggctataccagcctggaataactagccctggattgttaatgatattaacctttcattaatttcctggaaaatcccagatctctttgaactcaacctcccatcatatctgctaaggaaagcatcacaaagtgccacatacctaaatgaatcccaaccaacaccaactcccatcttgattaaatgaaacatcccattctacagagtaaataaaagcctttatgtagtatgtcccctttaattattctatcccctcttgttaagccacaggtttgaaatgaaaagtctttactgttccccttaaggaaatgtatttctcttcttcagtgctctgccagattgggacacaggagataactgaaagccctggtggatagatttggtcatactggttggagaaaagagggatatctagggaaagcattggactgtttcacagtcattacttatgacactcaatagtgattcaggtaagcagtttaaggataagcaataaaaatattcacatgatttgatataaatgggttatatttttggagagaggcaattccaactcacatgggccatgacttaacattccaagtccaccagtccttctctggattctttcttggtgaggcagcgtgctgggaaagcagagctagaaggaaagaatcacaaggtcaggcctttctcagagctctcaaagggacaaataggaaatgccattttcttccttggaggtaagtcagaaggaacctgaagaaatcctggccctatccaaaaccagagagattcaacaaaagcaggatgaagtttcagtcgaatcacttatgccaaaatcatgatctggatcaggatactactagataagtcaattctggcttgccctaaattcatacatacctacattaacatttatcctcaagccgcctatgaatgtcagttaattgtctcatttaaaacatctggaaatgggtcacttgctcaaattcactattaggaaatatcataggtttgctgaatgcaaagcttgttactttgaatactgtatcctaccctctggatttcagaatttcttattttattgagtgaaggatgagctgggcctttcccttataggagcagcccatgatctctgcctcctgtgttttcattgacagtgagcatcagggtggctttttcatgaagggaacccaaagatggaaggaaggctggattgggcgagtagtcagtgttgtgaagcacgaacttttattaaaaaaatatattggccgggcgtggtggctctcgcctgtaatcccagcactttgggaggcgaggcgggcagatcacgaggtcaggagatgaagaccatcttggccgacatggtgaaaccccgtctctactaaaaatacaaaaattagccaggcatggtggcgcatccctgtaatcccagctattcgggaggctgaggcaggagaatcgcttgaacccaggagttggaggttgcagtgagccgagattgcaccattgcactccagcctggcgacacagcgagactcggtctcaaaaaaaaaaaattatatatagataattttataattatctataattatatatataataaaaattatatatatatatgcctctctgaatctagctttgcacttagcacaagggaatcagataaataagttgcaagacctactatcaaggaattcacagtcagaaaagtaagcagcaattacaatactgtaggaaataaaggtaatcatggttatgaaaggagccaactagttctaaggagcccaaaccaaaactagtttttaacagaaaatttcctataggaaatggtacttcagctgactcttgaggggctgttctgtgtgggaaatgcgcgaggggagaagaaaagacacacaatacctttaagggtaaacaacctttatcccacataaatggcaatgcagatataataagcaaatgatataataagcaaattgcaatgggaagagaagggaaaatatatgtacatacatagatatatatgtgtgttgtgtgtgtatgtgtgtatatatgtgtgtgtgtgtatatatatacacatacacacacacacacacacacacacatatatatatatatatatatatatatatatatatatacacttaccaaactataagcattcaccaccagactgggaagcaacagcctgggctccagagtcagacactacacccagcagactatggaggattcaccaccagaccgggaagcaacagcctgggctccacagtcggccacccatccgtgcacaggcgaggagaggtctcatgaagctttggtgcagtctgggagcttagctctttttgtaacaagttgtttggcatgaggcccagtcacaagggcccttcctgactgggctcaaggaacacaaaaagttcaacctgtttttgcgattgtctattgtttttcaatgactaatgtataggaatagattgaaatagagaattctccgaaacagcactggatgaacgcttcaaggggctcacacaacctgttccaggacttggtgaccattgtttgtgtccatgttcaattgagttcaaatttaatatttaacttttcctccacaggggctcaccagagaagacagggcaaggtgagggggatctcctagcagaggaaacaacatgcgccaatcaagcaaagatatttttgtgcattcaaggaacacagagaggaaagacagtggcagatggagacgtataaagcagggatcctgttatgaaaagccctaaaaaatagggtatagagtttgggccatatttcagaggtaataagaaagcattctgcatttttaaagtaaggtttaaaaatgtttctaattagagatacagcaaagttggtgtgagaggataaagactgatatacataatctgaggagttcatgaaaattccatgtaaagcctgtagtatgaattggtcctaggagacagacagcttcaggggcatagagaactttaagcacttttccaagaagagtgaagggctggagaataaattgtgaactaaaatatattttgtgtttgagaacatgaagtacttgagagtgattattacacggtt[136 bp omitted]catggacaaacctcgtcttaattaaaaatataaaattagccgggcatggtggcacatgcctgtaatcccagctactcaggaggctgaggcaggagaactgcttgaacctgggaggcggaggttgcggtgagctgagatcgtgccattgcactccagcctgggcaacaagagcaaaaccccttctcaaaaaaaaaaaaaaggaaaaaaaaatttttagggacagtgtctcaaactgtcagtcatgctggagtagagtggtgcaatcacagtttactgttgcctcaaactgctaggctgaagcgatccttccacctcagtctgctgaatagggtgggactacaggaatgcaccactgtgcctggctaatttattttatttttgtcgagacggggtccgctatgttgcccaggctgttctcaaactcctggcctcaagaaatactttcccaccttggcctcccaaagtgctggaattacaggtgtaggccaccatgtccagccaaaaactaattctaatcctgatattcctcctcctggaaaccatgtagacagaaacaagaaaatcaaagtaaatcccaaccatcaggaaacagaaaatgaacagattccaaattatttggagatgtgaaaagaaaatgaaagaacaatgtctgtggaagccacagtgatgctacaaagaaaaacaaatgaggaatatccattcccatggggagtagaccatatcctgaatgaaagtttctgtgagcaggaatgatgtcaaaaggaggtggtaaaaggaggcccgaagatgtcagggggattcaaggtggcaaaacacattggttgtattttttttttaaagctttattgaaatataattcacataccatacaattaagccatttacagtgaacaattcaatggttcttagtatattcacaaatacgtgcaaccacagtcaatgttagaatattttcatcatttcgaaaagaaactctaaccctttggctatcactccttggcttccccactgccacatgtgccccatacttagcctcaaataatgactaatctactttctgactctatggattttcctattctggactttcatatgaatggaataacatatgtggacttgttactggcttctttcacgtagcataaggttctcaaggtttatccaaattgtagcatgaatcagtacttcattccttgctatgcctgaataatatctctgcaaatgaatagaccaccttttgtctacccattcgtctattaatggacatttgggttgtttccaccttttgacaattactattatttttgagatgaagtttcgctcttgttgcccaggctggagtgcaatggcacgatctcgactcaccacaacctccacctctggggttcaagtgactctcctgcctcagcctcccgagtagctgggattacaggcatgtaccactatgcccagctaattttgtatttttagtagagacggggtttcttcatgttggtcaggctagtctcaaattcccgacctcaggtgatccgcccgcctcggcctcccaaagtgctgggattacaggcctgagctaccatgcccggctgacaattatttttaaaatgctgcaatgaacattcatgtaaaagtttttgtttgaatatcatctattttgtagttttcagagtataagttttattttctatatagaaaatcatgccatctgcaaatagagatgctcttagctgtgttccgttcttttctccagtgtcttttatttcttttacttccccatttgccctagcccaattgccagtacaatgttaaacagaagtggggatccttgtctggtccctgatcttagagggaagacatccagtcttttaccattaagtgtgatgttggctgtgggtttttcctagatatcaggttgaattcctctttattcctagtttgtagaatgtgtatgttttaaaaaaaatcataaagggtattggctctggtcaaatgccttatctctatctattgagatgattgtgtgatttttgtttttttattctattgatatgatgtatcacattaactgacttttgatggtgagccaaccttgcatttctgggataaatcccactcagtcatgttatataattcattttagatgttactggatttggtttgctactacttgttgaggatttttacacccatattcttatgagatatactttgtctcgtttcagtatctgggaaatactggcctcataaaatgagctggggacttggctgtattccttaattatagtagaagacactgggtgaactcagagctgataataggagtcctcctgaaccagttgagcttctgaatggtaaagaaggcctggctattcaaagggaaccaaattttaaaaaaattgtcttctactggggtaacagaggaagaaacccttgagcaaaaaaaccttaaaaactacccttgccccattcacttttttcacatgaaaataccagtgacagctattccaggaaaatctattacatcctctccaaaatataaa[136 bp omitted]tggtgaaaccctgtctctactaaaaatacaaaaaattagccaggtgtggtggcatgtgcctgtagtgccagctacttgggaggctgaggcaggagaatcacttgaacctgggaggcagaggttccagtgagccaagatcacgccactgcacttcagcctagcaacagagcaagactccatctcaaaacaacaacaacaacaacaacaaaaaacacacaaagttttaaaagtgtgtcaaaatcccccatgtacaaaaaaactcactaaaaaaatcagagaagatgaaaatcatcacccaacatttcagtctgaattaaaaaaaaagtatgatgcaattgcagctctaaaagcagaccacaagcaaaaatatacgatctcaggagagagaagaaagtaatagatagaccatagatgggagttagtggaattcaagactgaaagagaaaataggctaagtcacatcagaaatgaagaataaactagctagtgcagcggcatgtgcctgtggtcccagctacttgggagactgagtctagaagattgcttgagtccaggagttcaaggttgaggccagcctgggcaacacagtgagacccccatctctaggcgcataagatctgacaaatgccacagaaagtatagtatggaacacagaatacagaaattaatgaacagaacaaaatttaacaaagaaacaaaaatcatttgaagaaatgaaaatgaaaagagagatccaatatgcaaaacgcagagcacctaaaaatgaaatccaaattaagaggatatatctaaaacgatggttgtagctgtgtatctaacactacagttttaatactcaagatgaatttcctgaaatagagtataaataaacgtgatgaaaagtgaaaccatattacaggtgaaaatgaaccaaaatagtagcaaaacatgacctaataaaattagactaaaactcatggggaatcaagataaaaatatcaaatataagaaaaaggaaattcaattgtcatcagacttctgcagtgctaaattcagtaccccaaacagtggggtaaatcttccaatatacttgtgaaaaaaacaaatgagggagtcaaaacatttttatatccagccaagctgtcattcgagtataaaggatataaggagttttatgatgcaacttaggaaatactgttgacatgcgctgtttcagaagaagctactagaagacatactccagccacaaaagaacaatagtgaaagtttcagcaaaagaatagtagtgatgctgaacatatttaaatgcaaatctaaataaaatagtaaaagcggaattatggtagccagcatcctggatggccccaaaggtacccagtatgtggtattcacaacactgtgtagctgcctcctatactgaataggattaacttgtatagcaataaggtactgcggaaatgatagagtatgagatagatataaaagacactgtggcttccagcttatgcgttcttgctgtccttttgctctggagaaaaccagttgacgtatcacagggacacttaagaaaccccatggagaggtctacatggtgagaaactgaagtctattgccaatagccatgtgagagccacgttggaaggtgatcctctagtccctgttatgccttcaaatgatagcagccctggccaagagtgtgactgcaacctcaagagaccccaagccagaacttcccagctaagccactcctgaactcctggtccacagaaaatggtgttaagataataaatatttatttctgttttagggtaatatgttttacagcaatagataactaatatagaaatgaaggttagagaatagaaaatagactagctcattgattgcctcatttgtgataactgagagataaagggtgtcatttcaagctgaaaatcaaggggaagaaatttagaaatgtttaggactacagccaaggcaggaggactgccttgaggccaggagtttgaggccagattaagcaaaagaatgagaccttctctaaaaaaaaaaaaaaaatgaatacaaatgtaagtcaaacagggcaaaatgtcaattaaatttcaacatacaagcaaaaagtaggaaatttaaaatgacagcacttagcaggaaaaattcaaattcctataaataaatctaacaatatatgtaacatacaatatcttttgtttgttggtttgtttttgagacagagtctcgctctgtcacccaggctggagtgcagtggcacaatctcggctcactgcaacttccgcctcccgggttcaagtaattctcctgtctcagactcccgagtagctgggactacaggcaccagccatcatgcccagctaatttttgtatttttagtagagacagagtttcaccatattggtcaggctggtctcgaactcctgacctcaggtgatccacctgcctcagcctcccaaagtgctgggaatacaggcatgagccaccgcacctggcctgtacaatgtctttatattaattactacaaatagttaaagaagacctaaacaaatgaaataatttatcacattcatgggatgaaaggctgataattttcaaggtgtcagtttccccaatatagtggtataggaagcttaaaagtaaaaggatagcaaaagatataccatgcaaatcataatcaaaataatgcttaggtggctataatatcaagacaccatagatttcagagcaaataaataacatggaagaaaggatggtcttgaatacatggtgccaggtcaactgaatttatatgaggaaaacaaatcatgatttcccctcacgacacaaaaatcaattccaggtttatatacctacatgtgacagataaatatagatgaaaatacagaatatcttcataccttggggataagcaaagatttgaataagatacagagtacaaaccataaaagaaaaatgataatgatcagactacattttaaaaagcaatttttgttcatcagaaaagagtgaatgggctggtcatggtggcttatgcctgtaattccagcactttggaaggctgaggcgggtggatcatctgaggtcaggagttcgagaccagcctgaccaacatggagaaaccttgtctcttactaaaaatacaaaattagccagacatggtggcgcatgcctgtaatcccagctactcaggaggctgaggcatgataatcacttgaaccggggaggcagagcttgcggtgagccgagatcgcaccattgcattccagcctgggcaacaagagcgaaactccatctcaaaaaaaaaaaaaaaaaaaaaaaagacagtgagtaaaaatgcaaaccttacgctaggagacgatatatacaatacacaaagctgacaagggactcattcagattatacaaagaactcttaaggattaacaatgaaagacaagtttcccaacagctaggctaagaacttgaactggcacttcccaaaggaagatatccaaatggacaatgcacattaaaacaaaggtattcaagttccttagtcatcagttaggaaaaccacaatgcaataccactacatatccaccatattggcaaacattttacagtctgacaatgccatgtgttaacaagaagatggatcaattggaacttgcataaactgttgatgggaacttttaactggttcagccattttggaaaactgacagtatctgcttgaggagattcacatactcttactcaccaattcctctccttggaataacccaatagaaatgcatacatgtaaacacaaaatgacaagtgcaagaatgctctcttcctgattattcatgagaataacgtattgtctgtatatatgataaacttcaataaaaagactaggaagaaatacagcatattacaaggcaaatacaaacaaaaaaataagcagaggccatgatcttgagcatgctaaagcctgcaattcataataaacatataacaatcattaatatctgtatatcaaagcaacaacaactttcataaagcaaaagttacaggttatataaaataaaattttggctgtgcacggtggctcacacctgtaatcccagcactttgggaggccaaggtgggcagatcacaaggtcaggagttcaagaccagcctggccaatgtggtgaaaccacgtgtctactaaaaatacaaaaaaaattagccgggcatgttggcgcatgcctgtagtcccagctactcaggagcctgaggcaggagaattgcttgaaccagaagttgcggtaagccgagatcccaccactgcactccagcctgggcgacagagggagaccccgtctcaaaaaaaataaaataaaataaaataaaatttcattaatacacctctctcaatccaagacaaatcaagtgtaaggcaaaaagtaagtatagactgaccagatgttagatcacaaataaaagttcactaagttccaaagtttaaaaataacacaatatagcaaaactgtaaattatattattggtgaagtggggacctatgtactttactggaagtcttcaacataatcaacagaggttgaggtccccttatgtcacagggatcaagactcctccacaacactgaggccaagacactacaccactgtattagttttctactgccatgaggtagtggcttaaaataatacaaatctattatcatatagttcagtagaagtctgagttgggtcttactaggctaaaatcaaggtgttggtagggctgtgttcctttctggaagctccaggggagaattcgttttcttatgttttccagcttctagaggccaccaacattccttggcttaaggcccacttcctctatctagtaagcaatgtggcatctctctgaccattcttctgcggtcacatctccctctgactttaaactcagccaggaaaggttcactgactttaaggacccatgtcattatattagtccaacaagataatcgcccccatttcaaggttcttaactttatcccctttgcaaagtcctttttgccatataaagtagcatcgtcctagtttccagggattaggaagtaaacattggttgcagggccatcattctgcctaccttgaccccccttctatcttaagcttccttctttctgagagatactcagtgaaggaaataatgtatacagtggtccatttccaagacaaaatgccttgaattggcttaggtaagcaaactacagaagaaacaggatatactaggcccctgcttggatagatgatgcctgcttgtcagcctcccgctttctccctttcccccacttagttgccttcacccaaaccaaagaagtttagtctaagatgaaagtttgctagcctgcaaaatagctcattttgtctgcttttatcagcctgcccagctgcttaggtcataagtcaactattgaagagaccttgagctaactaggattgcagtgcattgtgggccgcaaccaaatgcagcaagacaagcctaaaaaaaaaacacacacacacaccggctgggcgcggtggctcacgcctgtaatcccagcagtttggaaggccgaggcgggcggatcacaaagtcaagagatcgagaccatcctggccgacacggtgaaaccccatctctactaaaaatagaaaagttagctgggcgtggtggcacgcacctgtagtcccagctactcgggaggctgaggcaggagaatccacttgaacctgggaggcggaggttgcagtgagccgtgattgcaccactgcactccagcctggtgacagaacaagactctgtctcacaaaaatcaaaaaacaaaacacctgaagcccctacccaacaatcaataggcaacatccgggaagattgtgaccccatagttatcagcctatgaggaaccaggggaggaacctgtgcactaggggataaattgcttgttgaaactgttgggtgtgcctatcagacactgatcttgcaagaccatcattaaaagtctcacttttgctgttctccgggtctctgagtccattctttgggacgggtaagtttgtttctcacactcaagaaatcatctttcactatcccacgctatctctccaaaactgacttgaatccaaccagaataaatgtcaatccaaccttgtatttatatttatctactataagaagtcccagaatttctagtcaactgtcttttcggacattgtataccatcaagtctcatttgtccccttttctcattcttcccaactttcaacacttttcctgtatgccttcataatggaattcataattcattaacaaccaactcctcttttatcttcaaccacttccttgaacacgccctaacattctgagtctaacagaaactaggctgtatctggaggactctgcagccctctcaacatttccccagctacagcctcttaccagtgggtctgaaaatggaacagatggccggcctccttgttgttcactaccttcagacctttcttcctccctccacaaactctagttttgaatttcctgccatgagattgtatataactcaccacatctcacttttgttgacctctaccaaacacagggtattttccccctatatctgaaatcttcagctcatggtttactctctgcagcgcgattacccttttctattttttttaattcttgcatttttaactacacccacacagatgagccttgtttacttacccttgcctggacttttcccccctctcgtggctcatttccaacaacatgttgatgggtggttgttccccagccgtcttccccagccctctaccccaacctgctgctccatttctctgctctaatttacggagaaactcttgaactatgttgtctacactgtgtcccattcttctcccctccttctaggttgcccccactccaatccagctacgggccagcacaaaaactgctccccacacattcacgaaggactatgcctgtcactcaacgcaaagctcaattctttgtttttggccccatagcggctgctatcaccacctttacgaacgtggtcacgcacaacgcgacgcagtcataatcacgtacatacagtcacatttaaatagtccattagggtcacacacagcgcctgtcaacgtcgtgtgcgcgtgcgcgcacacacacacacacacacacatacacacacacacacacaagctcccgtcgcggccccagctcctgcatcaatttcactctcgcatccactgctcccatcgcgatcgctcgcccccacgctccctcgccggcaaagccaccaactccaaagacattagcacctcactcccctcagccccggcctcgggccctccggagtcattcggcttctgtgtctcggaatcactcacccggccctgcggtcccttgatggtggaaggttccgcgatctttctattaaccctaaagggacagagggctgacaggaagttgcccggggaacggtgcactctgggaaatgtagtccggagcctgggccgtctttaactgccccggacaccgcggtcaccattaacggaccctgcatttgagccccatcccctcgctgggcaaagaccatcgcccacacaccgctcacatctgctgccgagagcttccagaattccaggccgcgtttaggaagcttcagcggaggcatgcaggctgccctacctctgcaaaaggctcccagccctgggaacaggacagtaagcccaggccatcttaggctggaagtaaccttggtcccgacggccctgggaaatgtagtccagagcctggaacactgcagaaatgccccggggggatggtgcgatggttttcagtaggagctcgctgcgtgggcctctgacctatgtggcatggcgggaaagtcctacaagactgtgccaagcgagtggcgagtctgtcccgtctctgcccgagcctcggcccggctgggtggacacctcttgtcccacaagtaccagcctgggatagaacgaaggggaaacgatccatgggacacagctacatgcccagccctataggggtaccctgtctgggaatccatgagaactcttcctaataccttattcccatcctccaatcgcccttaaagtgtttggtttcaattaatgtttatagtaacattagtactgttttgtaaattccattcatgccattctttttgctgaagtacacacttgccagttttcatttgcttctcttttagatgtacatcatttcaatctacatctaaactttctgacagaggagtaatttttttcagtactttcaaacttatcaggtaactaaaatagttgtttctttttttattgtgaaacagaaaatacttgaagtgcataaaatgtgtaagttcagtataactccacacaagtgttggtatctcaagaacaaatgcccattctatgtgatcatttctctttttgtttgtttgtttgttgttttttttgagacagggtctggctttgtcacccaggctggagtacagtggcacgatctaggctctctgcaacctctgcctccctggctcaagtgatcctcccacctcagcctccagaatagctgggactacaggtgtgtgccatcacactcagctaatttttatagagacagggtctcgccatgttggccaggctggtctcgaactcctgggctcaagtgatcctcccaagtaggcctcacaaagtactggcattacaggcatgagtcactgcacataacctgtgtgatcatttctgatacccagctccagctccagctgatct[147 bp omitted]gtaaaaccctgtctctactaataatacaaaaattagctaggtgtggtggtgcatgcctgtaatcccagctactctggaggctgaggcaggagaatcgcttgaacccaggaggcagaggttgcagtgaaccaagatcacaccactgcactccagtctgggcgacaagagcgaaactccatctcaaaaaaagaaaaaaaagttttaatcttgctgtgaaatgtatataaatgcaatcaaattgtacaaattttctgtcttgattagttgttaaactcctaactggattaaccgaaaaccccatagtaaaggccttacagaaggaaaggtatgcccatccagccatcaacatcattttcctggtactactggcaggggaccccaagaccaaccactacacgcccaagctctgatgattcactgggaggctcacagtgaagtgatacaaaagaaaatcagtaaagaaaaaagcgcatggggcaaagtccaggggaaaccaggtgcacactgcgaagggttctttcccagtaaatttatatgggatttatttgttccccagcagtgagttgtgacaatacatgtgagatgttaccaatcagggcagtttattatagattcagtgccctatgtttttattgggggctggtcacataggcagtctgtgcctaacacataccagaatttcaaattcccagaaggaaagcgggtgtttaacataaaccatactgtttgtacaaaaagtttaggcatagtaagccacttattaggaaggtgggaaccaatctgaaattcaagttctagatgcaagccaaagactaacctcgcatatcaggcctttctaaggataagtagtctcagacctgctatgttaactaatttctgctcactactgtcctaaagatgtatggttttcagcaacatcaaattacaagacacatgaaaaggcaagaaaaatcatgacactcaagacataaaagcaaaaagcaacaacaaacaaatagaggtagactcaggtaggatctccccaggagcttgaggctgcagtgaactgtgattgcaccactgcactctagcctgggcaacaaagcaagaccctacctcaaaaattaaaagaaaagaaaaagatatgatgtagatgttggaactatctaaaaaggaatttaaaatattattaatattttcaaagctttaccataatgtttttcaaccagaggtgattttgttctccaggagatatacagcacagtatgaagttcttggtagtcacaactggagaggtacaatttgcatttagaggacagaggtcagggaagctgctaaatacactacaagcacaggatagcttgccacaacaaagaattatccagtcccaaataatggtccaaggttgagatgccctaagtaatcaagacagtgtgtttttggtgaaggacagaaagatagattaatggaaggaacaggctgggcacggtgggtcatgcctgtaatcccagcactgtgggaggccaaggcaggtggatcgcatgaggtcaggagtttgagaccagcctggccaatgtggtgaaaccccatctctactaaaaatacaaaaattagctgggtatggtggctcgtgcctgtaatcccagctactcaggaggctgagacatgagaacctcttcaacctggggaatggaggttgcagtgagctgagatgacaccactgcactccagcctgggcaacagagcaagactccatctcaaaaaatatatatatatatttttaggccaaggcaggcggatcacctaagatcaggagttcaagaccagcctgtccaacatggcgaaatcccatctctactaaaaaatacaaaaattagctggatgtggtaaggcagggagaattgcttgaacccaggaagtggaagttgcagtgagccgagatcacaccactgcactgcagcctggaggacatagcaagactccatctcggggtggggggtggggggaggggagaagttattattatttttttttgtagagacaaggtttcactatgttgccctggctggtctcaaactcctggcctgaagcgcccctcccgcctctgcctcccaaagtgcttggattacaggcatgaaccaccactcctagcctataaaacttttttaggaacacataaaagaaagtgtacatgacctgcagttagatgaagggttcttagacatgacaacaaaagcacaatccataaaagaacaacttgatatactggacttcatagaaaatgtaaacgtctgctattgaagtaacaccgttaaggagaaagacatgggatagattgggagaaaatatttgtaaatcatatatcaggcagaggacttgtatccagaatatatagagaaccttcaaaactcaacaagtaaacaaataacctcaagcttaaaatgtgcaaagggcataaacggaaataaaaagatagataccaggaaaaaatattataaaatgtgcctatatgagatttataaatcactaatttccaccatatataaagtgctcatacatttcaataaaagtgaataatatttctagaatttaaaaaattagtattatagtgagacagacaaaggaaacatagttcatggaaataataagttttaaatatttaaaaaggtattcaccttcatatccaatgaaacaaagttaataatatagtcagaatgaaactataaaagtcactttagggatacaatggagtggcttgcagcaaaccagtattcctgcagaaaactaaaaaatcagatataatacaaaaaaaaaaaacacaaagctttttaac[131 bp omitted]gacaccctgtctctactaaaaatacaaaaaattagctgggcgtagtggcggatgcctgtaatcccagctactcaggaggctgaggcaggagaatcgcttgaacccaggaggtggaggttgcagtgagccaagatcgcaccaccacactccagccctggcaacagtgagactccatctcaaaaaaaaaaaaaaaaaaaagacatgaaggagtgtttgggacaaccaggaatagcgtagtcaagactatagattgtaggtaatcacagacattgtgcagccacatttttcctggattatttgccaattcttggcaaagggcagaaggatccagactgctaggactttagttttctgggcctaaaaacacaacattggagactttatgggccaagatccctgtgagaaaagagggacacagacttgaactctacataaggctggttttcttctcaagacagttacccatttctgaaactggttgggtcaggaggctcaggaacttaggcggaaagcttccaaaaagcagcagagtttttggtagtcttgctggattaagaagacaaagattttgagttcaggccctgtcaggggaaggtgccttggtgaacacaccagatcctcctgaaaccctgatgggctacgtcctaggagcaggcaaaccagaagcacaatgaacctccacaaccgtaatggagccctgactcaactcaatcactgattaaatgaaggtcatcagcccctacttgatctgcccagtaaaggaaaggatgaattctctaaaggaagatattatctgcagcctctactatttttatacaccagtccagaatttaattttaaaaagtattaagcatgccgagacaggactgtatgacagaaaactctgaaaaaacaaacaggtcggccaggcacagtggctcacacctgtaatcccagcactttgggaggccaaggtgggtggatcacctgaggttgggagttcgagaccagcctgacaaatatggagaaaccccgtctctactaaaaatacaaaattagccgggcatggtggcacatgtctgtaatcccagctgctcgggaggctgaggcaggagagttgcttgaacccagaggtggagggtgcagtgagccgagattgcaccattgcactccagccttggcaacaagagcgaaactccatctcaaaaaaaaaaaaaaattaaaaaaaaaaaaaaggccgggcagggtgactgattcctgtaatcccagcactttgggaatgcctgggtggattgcttgagcccaggagtttgagatcagcctgggcaatatggcaaaacctcacctctataaaaaaattagatgggtgtggtgatacatacctgtggtcccagctacttgtgaagctgaggtgggaggatcgtttgagcccaggagattgaggctgcagtgagctgaaaacacaccactgtgctccagcctgagcaataaagcaagaccctgtctcaaaaacaaaacaaaacaaaaaacaaaaaaaaaaaaacccaaaaagcccccaaactccaaacaacaaacaaacaagcaaacaatagaaatagaccaaaatgtgatcctggcattagagtaagtaggcaaggactttttaaaaagatgaaaagatgaaaaattacaccaaagaactagtgtacacattggtatgtataattgaagtcccaaaagaaaagtagagacagcgtggagaagaaccctatttgaagagacaatggcaaggaatttcccaaaaccgattaaacacagcaaccatagattcaagaagttcaccaaaactctgagaaaaaaaatatatataacctagaattctatagtcagtaaaaatctccttcaaaaaagaaaggataaaaagacatttcagacagacca[140 bp omitted]cggtgaaaccccgtctctactaaaaatacaaaaaattagccgggcgtagtggcgggcgcctgtagtcccagctacttgggaggctgaggcaggagaatggcgtgaacccgggaggcggagcttgcagtgagctgagatcccgccactgcactccagcctgggcgacagagcgagactccgtctcaaaaaaaaaaaaaaaaaaaaaaaaaaagaaatactaaatggagtttttcgagaagaacaagatctcagatgaaacagaaagaaatttaggccaggcacagtggctaatactagtaatcccagcaatctgggaggccaaggtggaggttcatttgcatctaggagttcaagaccagcctgagcaatatagcaagactttgcctctacaaaaaatcaaaaattagctgggcgtggtggcgcacacctgcggttccagctactcaggaggctgaggtaggaggatcacttgagcctgggaggtcgaggctgcagtgagccatgatcatgccactgcactcaacctgggtgacagagtccctgtttccaaaaaaaaaaaaaattagtagggaaagaatagcaatagaaagagtaagtatgtgaatataaatgaatattgactgcacaaagtaatatactgccctctggggttttgaatgtatgcagaattaaataacaaaaataaagcaaaaatgaggatggaggtaaatggagttaaagtgtcccaaggtcctctagcagtattggggaaatggtaaagtcaataatttgtcctagactaaaagaaagaggaatgctgtaatctttcaggtaatcactaaaagatttttaaaaacatgtacaacaaattgacagaaaaaatggatccacctttggctttgcagaaaatgacagtgcaatatgacagcacaaagatttataaagaacctagattctttttttttttttgaggggggtggtgggagacggagtttcactcttgttgcccaggctggagtgcaatggcatgatctcggctcactgcaacctctgcctcccgggttcaagcgattctcctgcctcagcctacccagtagctgggattacaggaatgcaccaccacacttggctaatttttgtatttttatcagagacggcgtttcaccatgttggccaggatgatctcgaactcctgacctcaggtgatacgcccatcttggcctcccaaagtgcttggattacaggcatgagccaccacacctggccccaatcttatctttatctggaatatgatatatttcatttacacattcattgtccacttccccaactagaatggtatactctgtgaggacaggaaatcttggctgttctgttcactgatattttcctagtgcctagaatagcacctggcacagataaggagctcaatgaggccaggcgcagtggctcacgcctgtagtcccagcactttgggaggacgatgcgggcagatcacaagatcacgaggtcaggagatcgagaccatcctggctaacacagtgaaaccctgtctctactaaaaatacaaaaattagccgggcatggtggcaggcgcctgcagtcccagctactcgggaggctgaggcagaagaattcttgaacccgggaagcggaggttgcagtgagccgagacagtgccactgcactccagcctgggcgacagagcgagactccgtctcaaaaaaaaaaagagctcaatgaatatctgctgaatgaagaaatacaatggttgacaggaacaggaaataggaactttcatacatttctggttggaataaaaattagttcaccatttgtggaaggtaaatacttacatagcctctgtgttctaactgcatttccttagattctctattagtctatttggcactcgttcatcaagaggccaattatattaactatattttcttattttctgtattcttgatgctctggcatttggggaccttaccaaaaacagggagaggctgctcctctcagggctaattcctaaagataatcacagttttccaatgagcacagcttacatatgcaaaccaaccaatcctgagtctatacctctctgatattgtgatgtaataagaaatatgtattttggtctttatccatgcccatggttcttggttcatgggtcctaaaacccttgtagtttcctaaacagagtattttctgttaaaacacttgttcttagccaagtgcggtggctcacacctgtaatcccagcactttgagaggccaaggcaggcagatcatgaggttaggagttcaagaccagcctggccaacatggtgaaaccctgtctttactaaaaatacaaaaattagccgggtgtggtggcgcacatctgtaatcccagctactcgggaggctgaggcagaattgcttgaacccgggaggcagtggttgcagtgagccgagattgcgccactgcactccagcctgggcaatacagtaagactttgtcttgggaaaaaaaacaaaacaaaaaacaaaacaaaaacacttgttcttttgtccttggttatgttctgaatgtgttccccaaaatt[131 bp omitted]catggtgaaaccccgtctctactaaaaatacaaaaattagccgggattggtggcatgtgcctgtaatcccagctacttgggagactgagacaggagaatcacttgaactggggagatggaggttgcagtgagccaagatcacgtcattacactccagcctgggcgacaaagagagactctgtctcaaaaaaaaaaaaaagaagtggagcccttaggaggtgattaaattatgagggaagagcctacatagatggaattagtgctttcaaaaaaaggattgagggaatgggtccagcccttcagtaccttctgacatgtggggacacagcattcctgccctgtggaggatgcagcagcaaggtcccatcttggaatcagagagcagacctaccagacacctatcctgctggcatctcaatcttgaacttcccagcctccagaactgtgggaaataattttctattatttacaaattacttttcaggtattttgcttctcaggtattttgctgtagaagtactaagggactaagacacttcagttcctgaaatagcaccagagtaataaatgtgaaagatgtctttactgttcattaaccaacccctttcaaccacaagtgagttaatgaggtgaagttagtaaagcccctacataaccacaggatagggcaaccaaacatgtgattagaatgttggaaagttctgccctaccccatgacttctgggaaaaggaaaagggctgaaggttgaactcatcaccaatcgctgctgatttaattaatcatgcctacataatgaagccttcatagaaacacaaagggctgagttcaaacagcttatttcccggactaccccacaggcgttttcttttttctgttttttaggagacattggtggggtaaacatacaaaaatgtgattgcctcactcaaccaagagccttagccataattaaaagatgttcagatggagctgtacaggaatgtgatgctggagaactagagcaacagagccacattaggtatagatcgcttgcctgtatagtccaaattttgttgtttttgttttttgggtctttttgtttgtttgtttgttgtattttgttttgttttaaggagcggagagtttaataggcaagaaggaagggagaagacagaaggaagaagttcccccatacagagatgggggttgggggggtggtggctccaaagccgaaagaggaggtccccttgttttttgggggttttttgagacggagtctcactctgtcatccaggctggagtgcagtggtgcgatctcagttcactgcaacctctgtctgccgggttcaagccattctcctgcgtcagcctccaaagtagctgggattacaggtgcacaccaccacgcccagctaattttgtatttttagtagagacggggtttcaccatatt[137 bp omitted]caggctggtctcaaactcctgagctcaagtgatcctcctgcctcagccttccaaagtgctgagatcacaggcatgaaccaccatgcccggcccttcctgccattgttaaaagcttcaggattatattttacatcagcatttcctgttgtcatacacttcctgccatcatatttcggcaacctctaccacctcccaaagtttctagcttaaaaaattattgatttcctcctagctcccctttctgtcagttttttaattttatatttgttttcaaatgagtcctcacattgattttaaaaatttaacaagagtatagtgaaaaggaagttcccctttcactatttatcttccccatatgcatctattatgacgggtttcttttttaaactacttggagtactcataactgattttgtactctagttcagaagaaatgtctgaatgttaaatgtttacataaaaaatgctattttattatatcagtaatggagcttcccccctttaaaactgctgcaccaggaagatacaaccttgttatcacaatttaaagagaaaatgagacttggaggttcagattcctccacagtcatagtatcagctacccacgcagtgacccacattcaggtgattacacacactcatacacagatccatacacgatcttgccccccccacctccacacactcaatatgacctccccacgcccaaagctgcacacatcttgacctcacttctctcacacacacaccaatctgacccgcacgcggtttctttcactcaactacccagacacccctcatcccaccagcacaagcaggcccaccgcggtctcacacacactcgagccttcctttgcccagtctcacatgcatgactgggatcgcggatttgtccccttccgactccccatgctggttcggtcccagacgctcaggtgccacattggggtgcgctctcccggctcctccacacgctacgcagctgcccgcctcaagagcgtctgcgtgcttccagcgttaagtggaattccaagcagcctccggggcacagttagtctggtcactgcggccagactgccgcctcaggacccagagaacgcagcacactttagttgggcccatctatccccggcgaggcttggactacgtttcccaggagaccctgcggtccagtatgtctcccgaggaggggcggaagcccgggagccgccctctgaggctgggcggggtgaaagaaagcttgccccagaggacttaaacaggcaagaaggacttggttaaagactattgcaatagtcaacttccaatacaacagcagctggagatttatagctaacgggctgggtgaaggagttaaaggatgctaaattactaagaggaagttaagtatcaagagtggggggattgttactaaactggcttagctggattcttgctgaagtgctgttcgcaggctatggaggaggcctggccaagcaaaaagggctcagaggagcctgactaaagcttggtctagggactccttgtcaggtgagactcccggaaggctccgatgggcagctcacctcaaagagatagttttgttggtgccagagtccgcgccaggggaatcgggatggctgggctgtagctttcggcaacctgtcgctttctggactacacttcccagaagcctctaggcccagggcactctcccgcgataactagattgtctcttgaggagtgggcgggatcttcccgcggatttgggcaagcggccttggggctttgtgagatagctagggtcgacttgtgtggattctagtagaacggagctgaccctatccgaacaggcgtaagtgaggcggctcggagcctggcgcgacaggaactcccgacctgtgtgggctgcgtggggaacaggctaaggagcgattgtgaggagtgtgtacggttgtgactgggggcgtgtgtctgtgcgaccgtgtatggaactgtgagggcggggaggaggactttttgtttatgtttgtgcgggtgtgagtagagtttaattgtgaccgggttgggcactgtgtttgcgagtgtgaggttcctggaccgcggttgtgactgtatgtccccttggggtgtgtgtgtgtgtgtttactaccatttgccgaactgtgtgtagtatgccttaattttgaggtttgtggctgcttccgtgtgtgtgtgtgcgcgcgcgttggtgatattgttgatggagggtgcgtgtgaatttgttgtcattgtgaccccaaggtgtatgtcactgggaatttgagagatgcccacggactctgtggttgtgtccgtgtctacccccgtggtgtgtatgagtgtgtgattgtgtgttgtgtttaggtttggggtgcctgtgacgtttatgtccctgcggtgtgagtgagtttgtgtgactatgtgtccgtatagccaatgtaggtatggggagtctttgtctttgtgacttcagccattggagacccctgtgagctcagggacaggttctgcccagaacggcattgaccctaccgttgtctgtgatgcccggattaagcaggatgccctagacttctctgaccttcctctgtaggtgatgggcagtaggggctgagcaaagataacttctgacatagtcaaaccaactccctctcagaagaacctgatgtttcctgactgctttctccttcctcagccctgccctgcttggatagaggcctccgaacaggagtaaagaatggctgttgaacatccacaaggcacctgcaaggtagcttgtcctgtcctcttgtttaagaaaaatccctttttctttgtcaggacatagttgctttccttctcttgaaaattcttgcctatgagatgacctgatccctggagtttccattttgagaaaatgtggtgtcttcaaaccccacctcccacacctgattttcccttactgatttgtcagatggttttaatttttctttttcttttttttttctttctttctttttttttttttttttttgagacagaattacaggcgtgagctgctgtgcccggccttatccttctactcttgatggacatttgtcttgtaatttttggctactacaggcagtgtgactatgatcattttgtgcgcatattttggtacacatttgcttgcatttctttagaatatatacctagtgattaaattgctgatagtggctggatgcagtggctcatgcctgtaatcccagcactttggggggccaaggcgggcggatcacgaggtcaagagatcaagatcatcctggccaacatgaggaaaccccgtctctactaaaaacacaaaaattagctgggcgtggtggcacgcgcctgtagtcccagctacttgggaggctgaggagaatcgcttgaacccgggaggcagaggttgcagtgagccaagattgtgccactgccctccagcctggtgacagagtgagactccatctcaaaaaaaaaaaaaaaaagtgctaataggtagggtttgtacatcttcagttttaccaaacattgccaaactgttctctaaagatactgtacttatgccagcagtttacaagagttttcttagctccacatccatgctagacatcataaaactcttaaatttttgccaatctggtgggtgtctaatgttatatttaatttaaatttcctttattgctaataaagttgagcattgattcttggccatttgaatgtccccttttttgttttttttgttttttttttttgagactgagtctctattgcccaggctggagtgcagttgaatgtccccttttataaggtgttgttcaaatatttgaccaatttttaattgggtttttctctgatttacggcagttgtacatatgtgtatatatcttctgtaaattaatcttttttcagttgtatgtgtgataagtattttcacctgctctggtttgacttttcactctatgtggtgccttttgacaaatagaagttctggatttcattgtaataaaatcatttcctatggttagtcttgtttaagaaatttttgtctacctcaagataatgaagattttctttggtcttaaagccaaaagcttgctttctttctttcttttttttttttttttttttgactcgaagtttcgctcttattgcccaggctggagtgcaatggcatgatctcggctcaccacaacctccgcctcttgggttcaagtgattgtcctgcctcagcctcccaagtagctgggattacaggcatgcaccaccatacctggctaattttgtatttttagtagagacagggtttctccatgttggtcaggctggcctggaactaggtgatctgcctacctcagccttccaaagtgctgggattacaggcataagccaccgcacctggccaagccgaaagctttctagggtaggctttaatgtttaggtctttacaccacctggaatttttatagggtaggattgaatttcatttttctcccgagtgtgtatccagttattatagtatcatttattggaaagttcatattttctgcactgatatgcagtgccattttagtaaaaaaatcaagtgaacatatatgtctatgtctatttctggattctgttccactggtctatttgtcactcctcgcagtaataacatactgtcttactcactgtaactttgtatttggagcaagtacacttaccttctttttcctcaagagtgtcttggctatttgtgtttctttgtattttcgtgtcaattgttgaattagcttggttccacccaaacatctcttggaattttgatgaaattgcatggtacgtataattttttgagtagaaatttggaaactcttctacacttgatctgagccaaaaggccaagagacaatgggggactcttctaataacatgagcctctcagtggatgtaggtcttagtgtttctcaacaaggtcttgtttatctcctataaatagttctagacaagtaggaatcacgtaattcgttgtacagagtattcctttggcattgactgtctggaatctgagcagttcagataatgatcaatcatagtgataattttagcctgggttttgtttttttttttttttattgagcacctatctcctcctgcctgtccttgtccccctcctccacctcttcctcctcctcaaaaagcagctgtattagaaagactaaaatgtatggtaacttgaacagctaggttgtacaagaaaggaattgaaaattccctttctgatgtcttccaaaacttgaatttcatttaaatgcaccttattctttcctcagacctctaacttcaccctggagttgagcagaaacatggcttgccttttccctcagatcagtcttggactccagacaaagggttggaactttgagccaataagcaggttactggtaacagtgcctgaggaaagacaaagctatgggtgtaaggttctttatatacggtatcctcccactcctatcttctccagctctttatgtactaatataatttttaacattttcttttattcttggccttctcaaatacgtttttggaagtggggatatgaaaattagatttagatgtaaatgtagatatttattgtctaatattttttatgttagtaacatctggtacaatcaagcctgctttttcgttatcttttactcttctcacttatcagatttcttttttttcttttcttttctttttttttttttggatggagtctctctctgttgcccaggctggagtgcagtggtgcaatctcgggtcactgtaagctccacctcctgggtttgccattctcctgcctcagcctcccaagtagctgagactacacgcacccgccaccatgcccagctaattttttgtatttttagtagagacggggtttc[141 bp omitted]ggagtgcagtggcgccatctcagctcactgcaagctccgcctcccgggttcacgccattctcctgcctcagcctcccaagtagctgggactacaggcccccgccaccacgcccagctaatgttttgttttttgtatttttagtagagacggggtttcacg[138 bp omitted]ttgttgcccaggctggagtgcaatgatgtgatctcggttcatcacaacctctgtctcctgttcaagtgattctcctgcttcagcctcccgagtagctgggattacaggcatgtgccaccacgcctggctaattttgtatttttagtagagacagggatccttcctgttggtcaggctggtctcgaactcctgacctcaggtgatacactcacctcggcctcacaaagtgttgggattacaggcgtgagccaccgcacccggcccatgtttctttttaactacgcttttctcttcccgacctatcacctccactgtgctgtgtgaggtaatttctgcctctacatctttgccatcttttcttaccaactctttagttcacatattgtcttcattgggaaaaaagtcatctcagattattttacccacactagccttatctctctgtaatacgacataaagagcgtgaccttaagtatcagaaaaatgtggcatctgatttcacccataccacttgtgagtttaacctgtgaagaagagataataattttctgtcagtgtcgtcaagattgaaataacttatgtgcacaacacttaatacacatcaggtgttgagaaaatgttatttcccttctttacttttctttcttgggacctctatatcaattacagtagaaagcatttaactaaatgcctttggtttttcccaaaatatcttatatgtaagttttgctccctacctacattgtaaatcatttagaaccaggattgtgactttccgttctcttatatataacttttcaatccattttaaatttgttttgctttgatttggggatctaaattcaattttttctcatttacctggtcttattcccatattatttattcagtgataacttatttgcttttctcttactttgtactgcctacttggtgatattataagtaattcgtattatatatttgaattttttttcagttctttgatttatgtctctgtgcttccgcctgaaccatgtttagattttctttcaaaaacctttgaatacatgatcagatgtgtcacttcttaagattgttgtatttggccaggccagtggctcatgcctgtaatactagcacattgggaggccgaggcaggcgcatcacctgaggtcaggaatttgagaccagcctggacaacacggtgaaaccccatttctattaaaaatacaaaaattagccgggcatggtggcaggtacctgtaattccagctacctgggaggcaggagaatcgctggaacccgggaggcagagactgcagtgagccaagatggtgccactgcactccagcctgggtgacagaacgagactccgtctcaaaaaaaaaaaaaaaagattgctgtattctttattttcattacaaaaagaattccttattacaacacatttagaaaatagaaggataaagaaaaaacaaaggtcatctgtaatcctatcaattagatataactaccatcaaattgttacagcaaatacttagaattctttttttaatgcaatcgttgtgtagctattgatctgtgtaacctgtgtttattatgccaaaatacatatcaacagctgtccatgttaacatttatctttatcacgaattgtaatggcctcatagagttatttcaccaaggcttttttgttgaatatagtttgcttacaaattattggctttataaataaccatctactttggccaaatgctagtgcttgtttttttccttttcagtaaaattataattatatacataattaatgaatatatttttcttataaaaattgtttatttatttatttattttgagacggagtcttgctctgtcgcccaggctggagtgcagcggcgccatcttggctcactgcaagctccgcctcctgggttcacgccattctcctgcctcagcctcccgagtagctgggactacaggcgcccgccaccacgcccagctaatttttttgtatttttagcagagacggggtttctc[140 bp omitted]acttcacagtacactcagttgtctctaacagaatctgcttttctaactgccagttaggtcacttatagctgcataaggtacaaaatagcacttagaacaaataatgatttcatttcatttaagctattctttttttgtttgtttgcttgagactaggttttgctcttgtcaccccggctggagtgcaatggcacgatcttggctcactgcaacctccacttcctgggttcaagcaattctgcctcagcctcccaagtagctgggattacaggctcctggcacaacacctggctaatttttttttgtatatttagtggagatggggtttcaccatgttgtccaggctggtctcaaactcctgacctcaggtgatccgcccacctaggcctcccaaagtgctgggattacaggcatgagccactgcgcctggcctaagctagctattcttaaccttggttactaacctctggtcccaccctcagcaattctgatttaattggtctggggtatggcctgagcatcgccatttttctcattattgttttaagactaatcaagcccatttttcttattattgttttaagactaatcaagcaaagcagtgagaatggagaaggaacaaagaaatctgtaactggttgtgatcaattagttgtaaacaccacttgcacttggactagccaatcacaatttttaaaaggtcaccagatgactctatgcactgccacaattgagaactggtgacttcagcgcatataagctgatagaaaagcattaaaatttaatttgatgcggagtgggttcaaactttggaatatttaaaaaactacccaagaggcagggtgcagtggctcacgcccgtaatcccagcactttaggaggaaggcgggcggcggatcacctgaggtcgggagttcgagaccagcctggccaacatggtgaaaccccgtctctaccaaaaatagaaaaattagctgggtgtggtggtgggcacctgtagtcccagctactcgggaggctgaggcatgagaccccttgaacctgggaggtggaggttgcagggagccaagattgcaccactgcactccagcctaggcgacagagtaagatgctgtctcaaaaaataaaaatcaaaataaaaaataaaaagctacccaagtgattctaatgtacactcaggaatgagaatcactgagttagacaatcgtgatttgttttatggagctgagcacagtaactggaagaaaaatcaaagtcatgtatcaaggaagtagcggaaggagtagttttggcagaggcaatcaacaatatctgccatatctgtgcacttcctagcaatttattgtatgaaaatacactggtcatcttagtggtgtcttgtgggagagaaaacctaaagtatatggtacatacacataccacgtttaatcagcagtcttctttttaaaaaaaaaaaaaaactttcaaaagctttgggttttgtaaatcttaaacttttttatggttttttttttgttgttgttgacagcctgacagttgctcaggctggagtataggagtgcagtggcatgatctcagctcactgcagcctctgcctccccaggttcaagtgattctcctgcctcagcctcttgagtagctgagattacaggcatgcaccgccacacccagctaatatttgtatttttagtagagatggggttttgc[141 bp omitted]tttttttaattttgagattctttttttgtgacattgaattcaaatctgttttatattatttttatacaggcatttaattctatcaattactttttatttggtaatttcttgatgtccagtttttgatatgtatcttgctcttgtttacctcgtttctaggctgtttgtatttccatttagtttcatatttaacataagaattatttaggaatatgttttgttaactttaaaatttttattaaatttgaaacttgtagaagttaaaagaatagcataaagtattcctgtgtaccactcagattcaccagttgttaccttttgcctatttgcgttatcattctcatatgaacttgttttcttctctctctccctctctctctctgcacacacacacacacacacacagacacaccctacacacattttatctgtaccatttaagactaagttgcagatttttttgtttgtttgtttgtttttttgagacagtctcgctgggtcgcccaggctggagtgcaggggcgtgatctcggctcactgcaagtgccgcctcctgggtacactccattctcctgcctcagcctcccgagtagctggaactacaggcgcacgccaccacacccggctaattttttgtatttttagtagagatggggtttcaccgtgttagccagaatggtctcaatctcctgacctcgtgatccgcctgccttggcctcccaaagtgctgggattacaggcatgagccaccgcgtccagctaagttgcagatattttgcccctttatttcctaacaacaagattattctcttacataacccacagtacagttattaaaattttaacatttatatgatactctaatccatatttaaaatttttgattcatcccagtaatgttctttataacaaaccaccctaccctttctcctcatctatccaggatccactttaaaatcacactttaaatttactaattatgtctctctagtcttctttaatctggaagagttgctctctctttgtctttcatgatcttggaatttttgaagaggagaagccatttattttgtaaaaagtcccttaatttgggtttgtcttctggttcttcatgcttacattcaggctatgaattttgtggcaggaataccataaaggtaatattgtatccttcttgctgcatcatctcaggagatacatgattttgatttattccatttctggagatgttaactttgataatttgttaaggggatatctaccatgtttctccactgtaatattgacagttgtctatttgtaattaatagataatttgtggagatgtactttgtaactgtgtaaataactactcaccaaacttttccccactagtttaacatccatccactgataattattcttgggtctgttattagtaagatgtaatagtaataatgggagggttttttttttgtttgatttctatcgccattattttgtctgtattaattggttggcattctactataaagaagagctttcccttctctcccacttattcgtttatgtcaatatgaattcatagatgtttactttcctcaatgggttataatctgttgttatttatttttatactcaagttgtcccagatttggccagcaggaacccattctggctggcttctgtgttcctttgacttgtctccatgattctttgagcatttccttacttcctggaatgataagatgttccaggctcattcctaaatactgtcttagctccagcctggaatgaatcatttctctaaagagctctggttccttgcaatgtgaatatttggaaaccaatatctaggtgatgggactgcagtgttcattcttgtcacaacctgttccatatttatatcttccttctgtagtagtaagaaacctggcttccattatcctcattagatttacgaatttgttcaagtctagaatttatacatacagaatgtgagaatgctaacctatactgtggtaaaaatcaagaatactaagtagggttcagtatttgcttatagttctctttatctttttatttttatttatttatttatttttgagacggagtctcgctctatcaccaggctgaagtgcagtggcgtgatctccgctcactgcaacctctgtctcctgggttcaagtgatcctcttgcctgagcctcccaagtagctgggactacaggtgtgcaccaccacgcccagcaaattttttgtatttttagtagagactggttttcagcatgttggccaggatggtcttgatctcttgagcttgcaatccgccagcctcagcctcccaaagtgctgggattataggcatgagccaccatgcccagcctttttttttttttttttcttgagatggtgtcttgccctgtcacccaggctgcagtgcagtggcatgacctcggctcactgtaacctctgcctccctgttccagtgattcttctgcctcagcttcctgagtagctggaattacaggtgtccaccaccacacctggctaatttttgtatttttagtagagacggggtttctc[131 bp omitted]gtaatcaaaatattgtgttctaatttacttggatttggttttttcccccattaaagttgcttttgttattcatttgaaatacatttaagtttgttagttcctaccgtttggccttttttattactctgttcttggtgacttgattgtatgagtatgtaaaaatattagcatgctaccaaaagttaaaactagctgggtgtggtggctcacacctgtaatcccagcactttgggaggctgaggcaggtggatcacttgaggccgggagttcaagaccagcctgggcaacacagggaaaccccgtctctaccaaaaaatacaaaaattagccaggagtggtggtgcacacctgtaggcccagccacttgggaagctgaagcaggagaatcacttgaacctgggaggcagaggttgcagtgagccaagatcatgccactgcattccaacctgggcgacagagtgagacccagtctcaaaaaaaaaaaaaaaaaaaaaaaagttaaaactatgcaaaaaggtaaagttagagcatcatcactctgctcccacaacccttgttttggtgcgtgttaatgggctcaattgtgtcccttccaaaattcatatcttgaaagcctaaaccccagcgccttagaatgtgaatgtatttggaaacagggcctttaattcagttaaaatgaggccattaaggtgagtactcattcgacctgactcctatctttataagggaggaaatttggacacacagagagatgccaaggatacacacagaggaaagaccatgtgagtgcatagcaagaaagtgaccatctgcaagccaaggtgagaggcctcagaagaaaccaaacccgcaatcagcataatcttggactgatgtccataactgtgaacaaacaaatttctgttatttaaaccatccagtcagtggtattttattatggcagccctagcaaactaatacggtgagttatttcctcctgggtcatactatatacttgtctctctgggttatgctgagattggaccctcattataggtctataatgaggattgagcatttccttacttcctggaatgagaagatgttccaggctcattcctaaatactgtcttaacagacaacatttctggtggatcttaaagagaatgagcatgccctttgcactactccagatgatgttatcatagggttttcaaccagaggaaaactagtttctcaaatgctggattgcaagttatttccactagtaagagagatccccacagtgatttaggagttcaagattgccagtttcatctgggtcccatccgtatgtcccaactccaaatttcaggttcctattctttgccattcttctttcacatgaaaaatgtggcaagactgtgaattcaacattcatcataattcagcaagctgagcagttctgtgtttttcagcaatgtcagccctttggctacaagaaaggggagattcttttaggatttttatggaaatgctctcattctcagattgtgacttgaactgagagttaataaacctgggcttatcagcttctctttatgcatttaagttaacataagttaatccatcccacaccgcagtccttatatcattactgccataatggtcaagtacagcaactatttagctcccaaggcatgtgctttaattgacacttcattccaatcaaccatggcctaattaattgtaacattactgcatgccattaatttctaccaacccaaatcccattggcatggaactctgcactgcagtcaatcccaaaggattagcaaaaagatactaaaaggcatgaccaaactaatcccaaagttccatctttacaggcctttcacttggaacgacatcagttaccaattctgttgcagtcaatatctaatcaaggaacagaaaacacagcaatttgaactaggaaagtttaatataaaaaattattaaccatcgtggaactagagtaacaaaggattgaccagtaagaagtaaaggaaactctaaaaaccatgggaattacagccataaagagcagccattgatcgggcatgatgcctcacatctgtaatcccaacacttggggaagctgaggtgggaggataacttaaagccaggaatttcagaccagatcctgtctctacaaaaagaaaaataaaacagccaattagccaggtgtggtgcatgtgcctgtattcctagctacttgggaggctgaggtgggaggatggcttcagcctaagagtttgaggctgcagtgagctatgattgtgcctgggtacctgggtgactccagcctgggtgacagagtgagaccttgtctctaaaaaatttaaaaaaaaaataataagagcagccactactaatggtagagagtccgaggaagacgccctcccagggttaacatccagcccttgttggagagtgcacatccgtggctcattgaatgacagtaattgctgtggtaaagggctgggactaagatgaggcaagtgagacggtgagaagcactcaccgtcagatgtaactacacttggatgaccctgagacggaatgcctcaaattttgcaccctgggttcctcattcttaagacagtcatcgtcagggttatacgtgcagggttggcatctgagagtgaaagcctcaagttttgtgccataagtgcctcacttgccttagccatgtcctgttcctgctgtggaacttgctggaaatctgtgctctagaatttgccaggaatccatcctgtgtggcagactgggttgtcttaccagaagcatttgctacaaaactttcagacaaggctactgggtgctgctggccactttgtactttaagagccgggagctagagaagctgcttgactgaggaagcctggtaaagtcacccatgctgcaggaactgggtgctcgggaaactgaatgtgctgcaggaggtggacctggattctggagccgcctgccagcaagcatgccagaaccagaaaggaacgccccttcctcctgcagtgtctttcagacatccactactggcaaagcttaacattgttctggcaaggaaaaatatttctatagcccaggtctgcttttgcagagtgaaaaaatggtgaataaagggtgaatttggaacttaggggcaatacattgataactagcacatagtcttctaagagttttaaagttaattttttaaaatgtaagtcatttatctaagactgactttgctgtgagatagggatataatacttttcaaaatttttatttatttatttattgatagagacagagtctcactctgtcacacatgctggagtgtagtagttcgatctcggctcactgcaacctccacctcccaggttcacgtgattctcctgcctcagtctcccgagtagctgggactatagatatgtgccaccacgcccagctactttttgtatagtacttttttaaatggatagatgattatatcttttgaatttttccatataggcaatcataagatctgcaaacatcacttttgtttcttgctttctagtacttacatgttttatttgctacagcctttacggacatgcacatatttgacgtgtcccttcctggtttttgtaggtgctgttcatcagaatgaggaaattaccttccactcatagcttgttcaagttttgtgtttcttcttacagtaactggatgttgggttttatcaaattctctgattgttgtagacaattgtgcatttttctctctattctgttaatataattaattaactgatttttcagtgttgaagcaaccttgtattccttggataaaatcaacttattcataaagtttgcttttttaattattttattcagtttgctagagttttatttagggtgtgtgtgtgtgttcataaattatattagcccaaaattattctctcttcatatttagtattttgtcttatttggtatcatggctgttagactactttcatcagataaactgaaaaatgttctttctgtttcttttttcttcttttcccctcaaagtttgaggtttttcctgaaatattttatatattcaaatacataaaatctttttaggttaagtgataatacccatataaccaccatgaagattggaaaaatacaacattgctaataccacaaagccatctgcctgcccaaaccaaattaatctctttcgctctccactgaagtgtaactattaagtagattttgtaaaaatcattctctgctattataattttttgccaactttgtataactccctaaagaatattatacagctttgcctgcttttaaacttatgtaaattgaataataatatatgtgttcttttaagttttgttttgttttgtcttttttgagacagtctcactctgttgcccacgctagagtgtaatggcataatctcgtctcactgcaacctccacctcccgattcaagtgattctcctgcctcagcctcccaagtagctgggattacaggcgtgcaccaccaagcctagctaattttttgtattttttagtagagacggggtttcactgtgttggccaggctggtctcaaactcctgacctcaagcgatccacttgcctcggccttccaaagtgctagtattacaggcgtgagccgccgcacctggcccatgttgaatagtttagatatatcttgtttatctccactattatttaataacctttatgactatatcacagtgtattttgtccaacatattttttatgtggataattggtggtttccagcattttactcttaataaaactgttatgaacattgtagtggatgttttacctaggagtggaattgctgggtaatagggaatgtgcatgtgttagcctagataaccaaactctttcaaagtggttgtatgaaaaagtggtctacttccaacagtgtatatttgccgccgcctttgccacgtttttcccacatctttaccaacatttggaatagtcacactttttacctacctagtatacttagtaatatctaattatggtgttaatttgtatgaccatgactactgatgaaacagaacatcttttcatttgtattatcttttatctccttttctcattttttccccaagatttgttcttttaggcaaaattcacatgagatacacttaaccattttaaagtgtataattcagtggtatttagtataaattcagtggtatttgctgtattcacaatattgtgcaactattgattctctctagttttaaacctttttcatctgcctctagaaataccctgtacccaattgaagcacaaacttttaacttggatgaatttaaattgatgtattcttttctttcattgcttgtgctttaggtgttaaatttaagaattaattgccaaatctgaggtcatgaagaattagaaattctgtttttttgaaagaattttatgatttagcacttctgtttaggttgttgatccatcttgagctcacattttatatttgcatgtgtttatccagttgtcccaataccatttgttgaagagacatttctttctccattcagtggacttactatccttctgggaaatctattagtcatagatgtttgggtttatttctggattttcagttttattccattagtttacaagtctgttcttaggccagtcctattgattactgtagctttgtagtagtaagttttacaattgtaagaagagagtcctaccttttcattttcaatacacattgcagttccatatggattttgggtaccaattgcagttccatatggatatgaggagtggcttttttttttttttttttgagtcagagtcttgctgtgtcgcccaggctagagtgcagtggtgaaatctctgctcactgcaacctctgcttcctgcgttccaaaaattctcctgcctcaggctcccgagtagctgggattacaggtgcgtgccaccacgcccagctaattttttttacttttagtagagacagggttttacca[140 bp omitted]caataccattttttgaagagacatttctttctccattcagtggacttaactggccttctgggaaatctattagtcatagatgtttgggtttatttctggattttcagttttattccattagtttacaaggctgttcttaggccagtccttttgattactgtagctttataatagtaagttttacaattggaagaagtgagtcctactttttcattttcaatacacattacagttccatatgattttgggtacccattgcagttccacatggatatgaggagtggctttttttttttttttgagatggagtcttgctctgttgcccaggctggagtgcagtggtggagctcggctcactgcaacctccgcttcctgggttctaacaattctcctgcctcaggctcccgagtagctgggattacaggtgcgtgccaccacgcccagctaatttttttacttttagtagagacagggtttcaccatgttggccaagctagtctcaaactcctgacctcgtgatccacccgcctcagcctcccaaactgctgggattaccgccccgcctggcttttcatttcaaaggccactgaagtgttaatagagattgtattgaatctgcagattattttagcgagtattgccatcttcatgttaagtcttctaatccatgaacatgggattttaatctatttaatctccaactgatgtactgcaattcagttctggtactagctgcccagagttagtgtcagactccataggttttagcatacagtccccagtaaatctgcccttactttaggccaactagctacaattccaggaagttcccatgactccctccccctccccccttcatttagtaatttactacaactcacagaattcaggaaagcactacacttaaaattatagttttattatgaaagataaggatacaaattaggaacagcacagtaaagagacacatagagcaaggtctgaaagggacctatacacagtttctatgccctttcctggtgaaagcagggtgtgtcaccctccaaacacattgatatgttcaccagtaaggaagccccactgaactttggggtggaatttcattatgtaggcatgattgattaatcattggccacatgactgaactcagtctccagccccactttcttcctcagagactggctagctaaaagtatttttgatgactgccccaattctgaagctactcgggtccaccatgagttacctcattagcataaactcaggtgtgatccatagcaaagacatgtctagctctgtgctaggaaccctaggacaaagacctgacaaattattacacagggcataaacaagaccaggagtgaatatggcagtgttttcttatttatttagtggtttcttttctcttggatcatttagctttttttttttttttgagactgagtcttgctctgtcgccccggctggaatgcagtagcgtgatctcggctcactgcaagctctacctcctgggttcaagcagttctcctgcctcagcatcccaagtagctgggattacaggcacatgccaccacgcctggtgtgccaccatgcctgactaactgttttgtatttttaatagagacagggtttcaccatgtgggccaggctggtttcgaactcctgacctcaagtgagccgcccaccttggcctcccaaagtgctgggattacagacttgagccactgcacccagcccatttagttttttattaatgatttgagaaagatcttatattttacctgctagttctttgacagttaaatgttttgtaaatatcatcacccattctgtggcttgcgtctttttaacagattttattcataagtgagctgtgaatcacgcttatatttttacgcaactttgttttccatttaattactattacctttttgtccatatatttatcactaatttatattcaaaatctactggaaaataaatctttttccagtatgttctgtcagtttcttgggtttagagacatctcttctatgatcctttttttctctactgactgcttgtaccactattactctagaattctatctttttaaattcactgcccttctgcgttgagttctttgtttcttggattccttgccttcctgtttcttggtttggttcttcttgatattggtggcatgtgagaaaggatgaatgagaattaaattttgtgagttctggtatatttttcaaccactatattgattctttggcagggcatggaattctacattaaaaatatttttcctcagaattttaaaattatgatctctgtcttatagtattgtttagaactccaaagccattttcattcctggtctttggtttataccctgtctttgcatattggagccttttagggtattttctttgttcccagtgtcctagaacctaataaaaatatatgtaaatgtaaatcatcttttttttatactacataccaagtggacccattaaatatggagactcatttctttcaggtctgggaagttgcccttaatgctactttttagaacaatctgtattttctgttttctttgaaaaatttcaaacatagagaaaaaaagattattccagtgaattctgaatacccattttcttcctctgtttgggccactgtaacaaagtaccataaactagttatcttataaacaaaagaaacttatttctcacagttgtggaggctggaaagtacatgatcaagatgttggcagattcagtgtctggtaaggacctgctttctgcttcatagttggcaccttctctctttgtcctcacatagtaaaaagggaaaggcagtcctctgggtactcttttttaaggacattaattacattcatgagggctctgccctcatgacctaatcacctcccaaaggccccacctccttaccccattacattgataactaaagttcaacatttcatttgggggttgggaggacacaaacattcagactctatcatccatcacccaaattcttcagttgttgccattttgccacatttcctttatctttattaatacacacacatacacttttttttgtgagtcatttgaaaatatgttggggacatcttcacattttaccattaataattttaacatatatctccttagtattaatgatatatctccaacctaaggaaattaaaatagacttaataatattcttaagcattttatatttagacagctccagtagtcttcaagctctctttatttagctgctattgtgtttgtttgtttgttttacttgggtatgtgtttgcctgatctaggatccagtcaagatttatatattgatttggtcattggatctctttagtctcttttaatctggagcagtctctcattttttgttttatatgactttgaatttttttggtttttttgagatggagtttcactcttgttgcccaggctggagtgcaatggtacgatcttgtcttaccacaacctccgcctcctgggtacaagcgattctcctgcctcagcctccctagtagctgggattacaggcatgtgccactgcacccggctaattttgtatttttagtagagacggggtttctccatgttggtcaggctggtctcaaattcccgacctcaggtgatctgcccaacttggcctcccaaagtgctgggattacaggcatgagtcaccatgcccggccctgttttatatgacattgaatttttttgagaatccaggacaattattttatagaatgtcacataacctttatttgtctcatggctttctcatgtataggaagcttagattcaggttaaatatatttggcaagcataccacataggtggtatgatggtacatcttttattgtattacattgggaggaacatattgtcaggttgctctactactgttgatgccaagtgctgtatggatgtttgtcccctccgaatcttatgttgaaattttccccccattgttggaggtggggcctaatggcaggtgtttcagttatggggatggatccctgatgaacagattaatgccctccctggggggcagtgggtgagtgagttcttgctcttattacttcccaaaagagctggttgttaaaaagaacctagcacctctctcgaccctctcttttgcttcctctctctccacataatctctgcacatcccagctcctcttcaccttctgctagtggaagcagcctgaaaccttcatcagaagaagctgttggtgccatgcatcttgtacagcctgcagaactgtgagccaaataaacctcttttctttataagttacccactcttagatatgtcttcatagcaacacaagtagactaaggcatcaagttttaccacttaagattaaggtggtgagtaccaaatctttctattaaacaggtatatatttttccctttataattaataaataatctgtagagtgatactgtgagatcaagtgaatatccttttccgcagcacaattcattatccagctttagaatccattgaggatcctgaatcttttatcctattgacgatttttaaatggtgattttcaggttcctccgtttcttctagcacactttgtagattcttagcaaacttctaaaaatgatttcttctcagtagacgttggactttgttgcttgatctcccatattttcctattttccatttctgtatcttttttgtatgggttttaaagatattttattatttacttttgaatgatttgtttttattccaactttatattttcattttctatgaatacttttttcacttaatatttctttcatattattctattcttgtatcatgtggagtagcttctcatatccttatgagaatatacgttgtgacttttgaggttttctttgttctcctatatagtctgtcttctgagttgctttggttgctttgtttactgtcttttatcttacaggcttttctcaaatatctaatatttgcctattttttgtttctgttgtttttgtatatatttaagatatacaacatgaggttttgatacatattatgaaatggtgactgtagtcaagcaaattaacatgttcatcatctcacatagttacactttttgtgtgtgtgtggcaagagcacctaaaaatctactctcatcaaaaatctcaaatacaatacaatgtcattaactatagtcctcatgttgtacattggatctctagacttattcattctacatgtctgaaactttgtatcctttgacctgcatctccccattttctccctgacagtccctggtaactaccattctgtatgctatttctgtactttttttttttttttacattctacatataagtgagatcatgcagtatttctcttcgtctcccttatttcacgtagcataacgtcctccagtttcatgtctgttttgtcaaatggcaggatctctttcttttcaatggtgaataatattcatttatatatatcacaatttcttcatctgttcatccatcagtgggcacataggttattttcatgtcttggctattgtgaataatactgctttgaacatgtgagtgcacatatcttcatgaggtagtgatctatttgtaatttagagtgggccctaagaagctgtatgctatatattttgtatgttgattgttagacttttatgggtacttagttccctccacttcttaagtttttctggggttctgcagcataaaccgtacacttttttatacacaaaaagtgtaactatgtgtgggctttccttacttttagttaagattatatcttttttgattggtcattgtttatcttacactttcaacttaaaatgttggctgggcatggtggctcatgcctgttatcccagcactttgggaggccaaggcaggtggatcacttgaggtcaagagttcgagaccagcctggccaatatggtgaaaccccacctctactgaaaatacaaaaatcagccaggtgtggtggtgggcacctgcaatcccagctgtttgggaggctgaggcaggaggaccacttgaacctgggaggcagaggttgcagtgagctgagattgtgccattgcactccagtctgggtgacacgagtgaaactccactaaaaaaaaaaaaaggggggtggggtgccaggcctggtgactcatgcctgtaatcctagcactttgggaggctgaggtcgggagttcaagaccagcctgaccaacatagagaaaccctgtattactaaaaatacaaaattagccaggcgtggtggcacatgcctgtaatcccaggtactgaggaggctgaggcaggagaatcacttgaacccgggaggcggaggttgcagcgatctgagatcatgccattgcactccagcttaggcaacaagagcgaaactccatctcaaaataaataaataaataagctgaaaatgttttgttgctgcagcttcctctttaatttccttttatgtggtggttttgttctgttttacaaattccttttcattccttttagtgaggttttggaaagcgtacggggataaatgcacgtgatccacttgagctttttcagagaaattatgttgtatggctagagaaatctagtttttagatgtttatttgtaaggataatacattttgcaaataatttattatattattcaataaatgcatttaggttttttttgcatgtaccagagttcaagttgattaaattaatagatattatctttgtcttcatgaagcttggctctattgtagcagacagaggttaaacaagcattcaaacaaatatgaaaaatttaactgtagggaatggatacgtaaattacctattatcaaaacaaaacacaaagaaaagaggaaaaaagagctctgagaaatgatagtagagtgtgcataattcagactgaacatgtaggaaatattttaaagatacatcatttagcagagacctaaaccactgccagaaacttgcaaggccaagagtaggggcagtggatatagggggacatttcaggcagatgaaaccatgatggggatgggtcggtacagttttgtgcatttgaagaactatgaagactacatagtagctacagcttattgttgggtggggggtgcagggagggatattaggttgaagagacaggcagatcactgaggaacttttaagagcgagttcattttgagcagaacagttccaggctaaatatcactctgggtgctaagggtgcaaaactggaaatgcaggcaggtagaagaaatgctggtttagtgtccaagcaaaagataattttgatttggattagccagttggagactgaaagaacaatttcaagacatatttagacctgctctaaacaggattgttatgtaagttgtagaaagagattggtgccgaatgttttcactttttgggatttgaggtattcactcagggccttagatagtatctttaaatccattccctttcctagcctctacttttgaggcaaataagtctcccaaaataataagcactgcatagttactttatgcaagtatgtaagtagatttggtgtgatcagaatcattccataatcatcaaagatgaggttcaggatatttatatatcttcatctttcttgcagtcttctagtagtatcacattgcctcctgtcttgtcttccctttcctcttatgttaaaaccagattctgttcctctgctgtagcccttactgagctccatcttctctcaatgttatcatcatagaatttggaggcaaacttatttcttaaatggcataaacaaaccacattctaaccacagatgaatcttccctctccatagctcattccatactcatttagcacattagtctttcattgggaaactgctctttgtggattatctttcttttctgtctccatcagtttatatgcaaattatgtttattactgaaacatcccagatttcccaccccaggaaaaatgtagtactcccaacaaccctgataaatgaatatgagaattactctcatttataaatgtttatagcactagattcatctcttaaaaaattaagacagggccaggacatctgtataattaccaagctttcaaagtctgcaggacttttaaactaaactaaactactatttaaaactactattttaaataaatatctaaactactatttaaaaataatctgtttcctgaaaacctcctccactttctagtctgacttttactcattttctctgcttccctaatctgtttttcaaattgcccagtcatatgtgagaactgtataaaccactcaatttttatgaaaattaaattgtagttaagtctttcgtatctattataaacgtttaatctctcccagaacacaaaaaagtgaatgtttgcttttatattttctttcagactatgaatcaaagttgagaccaagaaattatttctgaaaaaggatatggaaaaccttacaaaacacagcattgagtgttcaagtttcagaggtgattgggaatgtaaaaaccagtttgagagaaaacagggatctcaggaaggacatttcagtgaaatgatatttactcctgaagacatgcccactttcagtatccagcatcagagaattcatactgatgagaaactccttgaatgtaaggaatgtgggaaggattttagttttgtatcagtccttgttcgacatcagcgaattcatactggtgagaaaccttatgaatgcaaagaatgtggcaaggcctttggtagtggtgcaaaccttgcttaccatcaaagaattcatactggtgagaagccttttgaatgtaaagaatgtgggaaggcctttggtagtggctcaaaccttactcaccatcagagaattcatactggtgagaaaccctatgagtgtaaggaatgtgggaaagcctttagttttggatcaggccttattcgacatcagatcattcacagtggtgagaagccttatgagtgtaaggaatgtgggaagtcctttagttttgaatcagcccttattcggcatcacagaattcacacaggtgagaaaccttatgaatgtatagattgtggtaaagcctttggcagtggttcaaaccttactcaacatcggcggattcatactggtgagaaaccttatgaatgcaaagcatgtggaatggcctttagcagtggttcggctcttactcggcatcagagaattcataccggtgagaaaccatatatatgtaatgaatgtggtaaggcctttagttttggatcagcccttactcgacatcaaagaattcatactggtgagaaaccttatgtatgtaaggaatgtgggaaggcttttaatagtggctcagatctcactcagcatcagagaattcacactggtgagaaaccctatgagtgtaaggagtgtgagaaagcctttagaagtggttcaaaacttattcagcatcaaagaatgcatactggagagaaaccttatgaatgtaaggaatgtgggaagacctttagtagtggttcagaccttactcaacatcacagaattcatactggtgagaaaccctatgaatgtaaggaatgtgggaaggcctttggtagtggctcaaaacttatccaacaccagctaatccatactggtgaaagaccctatgaatgtaaagaatgtggaaagtcctttagtagtggttcagctcttaatcggcaccagagaatacacactggtgagaaaccctatgaatgtaaggagtgtgggaaggctttttatagtggctcaagccttactcagcatcagagaattcatacaggtgagaaactttatgaatgtaagaactgtgggaaggcttatgggagggattcagagtttcagcaacataagaaaagtcataatggtaagaaactctgcgaattggaaactataaattgaaattatgtgctgaaggaaggactctaaacatatgacttaagaaaattcatagtggtgaaaatctctacaaatagaactaaggtacaaatgccttacttatgcttcacaggttagtcagtctaagaatatttatacaggaaaaaaatcaccccaaataaaataaatatttgaagatccttatctatattcattccttcattacttttggaaaattcttacttgtgaatgttaaaaatgaaaaaaaaatcatttattatattttgcctcaactttaaacattggaaaactcatttctgggttaatcctactatattttttcaatggtcttttttttttgtattatacagaattactgattcattgaaaaattattttatttattgcaagtctaaatttatcctttttttctttcctgattatcctaacaccatttattcaataaccttgtccattttcatattttttttattgactatttgatggtaagttacatttttattcacataaagcttggatatcaggtcagtgtttttttgtttttgtttttgtttttgtttttttgagatggagtctcactgtcaccaggctggagtgcagtggtgcaatctcggttcactgcaacctccacctcccgagttcaagtgattttcctgcctcagctccccagtagctgggactacaggcgcccgccaccacgcccagctaattttttgtattttcattagagatggggtttcaccacgttggccaggatggtctcgatctcttgacctcgtgatccatctgcctcggcctcccaacgtgctggaattacaggcatgagccaccatgcctggcccagtgtttgttttttaaatttatatatatgtatctatgtctcatcctgtttatggtcaataactgttacttttaagtatcctttaatacctgtaccttttgttttagaagattgtttactttccttttataaaattatactctccattttagcaaaacagctttccctcatcataatgtagataaaaagaaaaaaaggatatggttacctgtaatcttaccaatcatagataatcactgtcaaacttttggagcaaatcctttaatactatctctcattgttttggaaacaaggtgtgattatgctatactataaccagcccttaatattttttgtctgtaaatatgttgttaccattttattggctttatagtattcacctgtctttatcaaaccccaattttgtcaaatattaaaaattttgccattataaacacttaccttgatggccccttttcagtgtgtctgatttatttatttattgttcatttcagagataatgtatcaattgcttttgcatataaaagatttttacattacagataaagccggcctttcctttgagcagcattcctggcctcagttcctttccaatgttaaccaatttacttattcttccagatccttttatatgcatctgtaacatacctatggtaatgtgggtagaatcaatacctcagagccttattgtgtggattctataattgtgcctatcacataataaatgcttagtgaatgttacccatcactattatcttctcaagcttcatctttattatttctagaaaaacttttagccatgatccataccttactcaacaacaaagacctcataatggagaaagacattcatttaaatgaatgtagggaaaatttgattgacattctttccttgttgaataagaatatttgctgccaggcacagtggctcacacctgtaatttcagcactttgggaggccaaggtgggtggatcacttgaggccaggagcctagccaacatggtgaaaccccatctctattaaaaatacaaaaattagccaggcatggtggcgtgtgcctgtagttccagctactcgggagtctgaggcataaggattgcttgaacctgtggaggttgcagtgaaccaagattgcaccactgaactccaacctgggtgacagagcaaggctctgtctcagaacaaaataaaaataaataaataaaaaattgtcctacagaaaaaataataagattataaagtgtgagaagacaaatacactataaaatttgtaccagggtagaagtaaaaaaactagcagttttctccattgaaatccaaatattaattcagtactcatctgcatgattctttgcttaaaaataaaatgcaggcaggcacagtaactcttgcctgaaatctcagcactttgggaggctgaggcaggaggattgctggaagcctggagtttgagaccagcctgggtaacatagcaagcccccatctctacaataaaagttttaaaaatgagccaggcatggtggcctccagctaccagaggctgaggtgggaggatcagttgagcccaggaattcaaggcctcagtgcactattattgtgccactgcactccagcctggaaaacagaataagatcctgtctctaaaaataaatgagtaaattaactaaaatcaaatacattattttttaaataagtggcactgaatagattacatagcaaaacctgtgaggacctgtaatatacagaggaaattttatagctctaaattcattcatttgttagaatgttaaagaaattataaataaagaaaccaagcatataacccaagaagctggagaaagaataactacaacaaaaaccctaaggataatgggagggaaaaataattttagaataaaaaaagctagatcaatcacaacctaatgttttgaaaacaaaaatagtagcagttctcataaataaaggtatatgaacatgaatgcaaaagcgacattactctagagactttacagattacaggttgagcatgcttaatttgaaaattcaatatctgaaatgctccaaattccaaaactttttgagctcaacattatgctcaaagataatttcagacttctggattaagtatgctcacctggtaaatataatgcaaatattccaaaatccaaaacacttctggtcccaagcattttgagggatactcagcttatgtttattacgattacatgtaaccttttaataattattttgaaaattgaacattttagtaaaaggattttaatcaccagaactgactcaaagtggcatagaaatgggtattatataagggatataaagcaaaaactatatctaggaaggctggggaaaaaaaccctgtagccaaagtctcttttataccccccagtcaggtcccttgagtgaatattctggcattcaatcacattttgcattggaaagagcaaaagatgaaaatatatcagcattagtatattttatgtctttttaatttgaggtaattagattttttaatttttaaaaagaatggaataggaatcattaaaaacagactaaagtaacatgaaatcttaagatgctacatataaaatacatcactttaaatatgaaactaatttttaaagtcctgcagattaatctgttggagatatatattgaaacccactttcagagacattaaaatgcggggtaaaaagtgcattttagaactgataaactacttcatcaatgattttaatggttccttttctttagattttcaaattcgttgatattggcaaacagaattggctttcagttttcagtctctgtatatatatttgtatttctactcatagttttatttttaaaccactttattcctctaaattgatttgaaggagtcccattcattttacttgttttttttttaaaaaaaaccttatctgggttttcttcatgcttttgactatttttgtttgctttttctatttcaaaaatatatttcactattttctttttatttgtgtgtatttctgttgagtacatgtgcttggttaatatattttcagtctcttttaaattggaagcatttaaggctacaagatttcctttgaatattgctgtatctggggcccatggtttttttttcttcttgagatggagtctcgctctgtcaccaggctggagtgcagtggcgtgatctcggctcactgcaacctccgcctcccaggttcaagtgattctcctgcctcagcctcctgagtagctgggactacaggcatgcgccaccacgcctggctaatttttgtattttttagtagagacggggttttacca[136 bp omitted]tttaatcttgatttctctttgattcactagttacctaggtgtctgtatgtttgtgtgtgtttctaaattttcaaaaacctgtgaaaaaaatttagcatatgaacttataatgtgtgtgatctgtgaaacttcattaaaaagttaaaacattaatttattatttgtggccaaatatacgttaggtttttaatacattttatagatatatgatgtgaaataatatatattctctataaaacacaaagttctacttaattatattaagcttcgtgattatattatttaaatatcctctgattattttgtttaattctgaaaagtgggcacaaaacgcccagctatattgtttcaaggtcttctgttaatataggggttttactttttatgtttggttgctgtatttttcactgtgatgttgaattccaatttctctaatattgaaaattctgctttggccagtagagctgcactaggtctgttgtgtcagcttgttctaggtatatatccttataaacaccatatagttagtgttttatttttaacccaatttgtttttgtattttaattggagaacaccatatatctataggcaggcttactcaatttctatgaaatcaccttttaaaatatctttttctattaaagagcagaaaagtaactaaaattctcaaactctgttgctctttcctatgtagctactcgtcatggtcatttaatgcatcgtttctcttcatctctctgttccctaaagattgaagttttctaagactcagcctctgacacatttactaattatacttaattgttccttggtgatttcacccccgtgggtttgtttcccttgaactccacactcactacgttcagtagccttctctacactacttgaattatttttatttaggtatataaaatactggtggcaatagcataaattctaagtgttaaacttgatgaagtaatattgtacacctatgtaagcactgcccagactgatatacatttacagcctaaggaggcttctttgtgctgctttgctattaatattccattgcccagaaatagcccctctcctaatttccataaccagagataagcttacatgtttttccacttcatgtaaatggaatcgtacgctgaaccctttttgtgtctggtttcttttgctcaacattatttcatgcaacaataaggatggctctctcagacataatattcatttttatttatgtagtgttttatgggaattgcactgagttagagaaactgaagtctgaaggaatagtttccacaagactgccctcatttcagacaccaggcacaagttcagaggttccaagggctacccatacttcagaccagctgactacaaatttgggacttgtcatgactacccttgataattcagtataataattcacagaactcaagataatactatacctatgattacaacttatttatttttattttttttgagacagagtcttgctcctgttgccccggctggagtgcagtggcacgatctcggctcactgcaacctccgcctcctgggttcaagcgattctcctgcctcagcctcgtgagtagctgggattacaggcacccaccaccatgcccagctaaatttttgtacttttagtagagacg[131 bp omitted]tacaaattacaactagccagaggaagagacacatagaatgaagtctgagaggggtccaaagatgagtcttctggtcatcctatccctatggagtcctggatggcattacctccttccagctacaatgtgtactgataagtgttgcaatccagggaagctcaccttagcctttggtttccagtgtttttcttggggtttgataatatactgcccacatagctgacctttgtctttctgcccttcttgctggtttgtctaatactgtttgtctgccatttccccagaagtcaaaactgagatagcatgcctcaaagcactcatcataaatcatgttatactgtcgggtggccatccaaagcacccagccaaaccaagacactgttattgggcaggacattccagaggcctagagtacccccagtgggcctcccagtacccaaggtaaaggcaagacctctctttgggtgaagttaatttatcactatacaggaatatactttgacttactcattctttcgttgatgggtatctgtattgtttctacaactctgggaaccttcttatacatgtctttatgtagacatatttactcttttctattggcagtatacttcagaatggaattgctgagtcagagataggctatatttagtaaatgtcagttttccaaagtgattgtgcaaatttacactcccacaaagaatctgtaagggtttcatttgctgtatgtcctcttcacacttagtattgtatagtcattctaatgggactatactaatgtattagttactagaattatatatagaaatattatataactattatatagttatataagtatgtagaaagttacattttcacttccaatgactaataatgttgaataccttttcatatgcttgcttactagcttttttgatatcttgtatgcagggttggtaagactttggccgttttaaatgcgtatcgtgtcttttccttattgctttgtgtgaattctttgtgtattttggatctgatttgtttgctagatatgtatgttgcaaatgccttttgctttgtggcttgcatttccactctcttaaaggtatgggttgatgaattggagtttttaattttaatgaactcctgtttatcaacctttttctatatatggttagaactttgagtcttaaatgtttgtgtgcgtgtgtgtgtgtgtttcatgcctacaaacttatgaaggtattctctttcttcccctagaggctttatttcaccactcacatcttgcctgggattacaggtgtgagccaccgtgcctggcctatgattacaactttattatagtgaaaggatacatatttcaactagccacaggaagagacacatagaatgaagtctgagagaagtttggtgtacagtatgagatttagtgggtcaagtttaattatcaatactgctacggatatccaagttaatccagtgttatgtaatgaaaagtaaattctttccccccagttatattccaattctacccgcctctcatcacctttcctgataccatcctgatcctaaccatggttatgttacttagatgtttataataacctaatttgtctgtttgtgtagctttcagggcgttcacaacagcatagccacagtgatttagatgatatcactccaagaaaatttgagcaacaaataaagtggtattggattataacccgaagtataaaataaatatccatgcattcatactgatatgactatattatcagataaataactaaataaatggagaagagataaatctccagtacagaattctaaataatttatgtagatattctgccttcaggaaagtggagcataaccccgctccttaagtacgtgctgtgcatagtgacttccaaagatgactgtatgggaaaagggagaaaagactaaatttacactggagaaacttgacaaacactccctcactcaggtgatcaagaccaacaaaaagtcatcatgctgatagtatgaatctttgatatctatgaggaaaatggcactttacctctgtgatcttcctcctgcaaacaacctcagtctaatcatgagaaaaacatcagtcagatcttagcggaggaacattctacgctatactgacctcctcaaaatagttaaggtcatttaaaatgaggaagagggccaggcccgctggctcatgcctataatcccagcactttgggaggccgaggagggtggatcacctgaggtcaggagttcgagaccagcctggccaaca[140 bp omitted]cggtgaaaccccgtctctactaaaaaaaaaaaatacaaaaaattagccgggcgtggtggtgggcgcctgtaatcccagctactcgggaggctgaggcaggagaatggcatgaacccaagaggcggagcttgcagtgagccgggatagcgccactgcagtccagcttgggcgaaagagtgagactccgtctcaaaaaaaaaaaaaaaaaaaattagctgggggtggtggtgggtgcctgtaatcccagctactcgggaggctgaggcaggagatccacttgaacccgggattcactgcagagattgcagtgagctgagaccgcaccattgcactccagcctgagcaacgagcaaaactccatctcaaaaaacaccaccaccaccaccaccaccaccaacaacaacaaaaaaaacaaggaagaaactgtcacagccaacagtaacctaaggggaaatgatgactaaatgcaatgtgttctcctgcttagaatgctggaacagaaaaaggaagaaaagcttaaaaacctaagaacatttggaataaagtgtaagctttagctaataataatgtaccaatacttgttaattaattgtaacaaatgtaccatataatgtaagatgtttttagtagtaggggaaactaggtgtagggtatatgggaattctctctattgcttttataattattctgtaaatctaaaaactgttctaaaacaaattatatattttacaatagagaatgaagctgagtattcaaattatttataaatagtcattcctgtgtatccacagagccggatttatcatgatttgagtaatgttattacatggagtcatttacatctatgatattagatccatgttttacaaaaggaacacacgtagagcccagaccactgtttcctgacatgctaggctaaaagtcaagattcgagactcagaatcattttggtcctcttcaacattttactccatctaatggcacactctacttattgggtctcctgaactctagagccagtaacagtgatcctaaagtcattctcatgattttgcctgaggtacaatttaaattcttggatgactccaaatctgcagaaatattaatctagaaaaaataatagttatgtgtacaggaaaaactgtaaattttactacatgtgaaaaagatttctgcttattaaaaaataccaaagaggccaaaagattaggaaaagttactgaaacaacatatgacaaacactaaccttaatatataaagaaatatatatatttcttaaatatgtaaagaaatttgtaatcagtaaagatgaccaacaacgtgatggtgaaacagaagagtttatagtaacatgaacatgcctgttaaacatttgaataaatgatcagtttctcataacatagaaatagaaatgaaattataaattgtgctgtcttgtttgatcaaaagtttgataaaacatttaatagtatacatattccagggaagatgtttcctgttctatctcccaacacatacagtgttattaccacaatatagtgtcaaaccgtcaatgcaaaaatctttaatctccttgccctgatgatatctgtctctacaatatccagtactcccacgtcaataaaatttatacacccattttctgttcccacctaccacactaaattcttgtgatctttctactctgcactctgaaatccacagtaacttattagcataatgcccccaccttttaaaaaagcattcttaatttgccttttattgtttcttaattataggtttaggaagttacaagggcagttgtgttacatacacatatagtgtagtggggaaagtgttggcttttaatggactcattacctaaataatgtaccttgtactaaataggattttttttggtttttttttgagatggagtctggctttgttgctcccccggctggagtgcaatggcataatctcggctcactgcaacctccacctcccacattcaagcaatttgctctgttgcccaggctggagtgcaatggcactatctcagctcactgcaacctccgcttctcaggttcaagtaattctcctgcctcagcctcccaagtagctgggactacagtgcctgccaccatgcccagccaatttttctatttttagtagagacagggtttcgccatgtcagccagactggtctcaaactcttgacatcatgtgatctgcccgccttggccttgcaaagtgctgggattacaggtgtgagtgcctggcttatttttaattctgtgtatgtgatgaatcatgtattgagttgcatatgttgagccatccttacaccccaggaataaaatccacttgactgtgctgttactatcttttttatgtactgtttgatttggtttgctagtattttgctgaagatttttgtgtctattttcatcagggatattggcttgtagtttttttgtgtgttttatccttgcctggcttcagtatcaggatgatactggctttgtagaatgagttagggaggattccctcctataatttttggaatagtttcaatagtgctgttactagttcttccttgcatgtctagtagaattcagctgtgaatctgtctggtcctgggctttttgtttttgcaagatttttttctattactgattcaatttcaatactcagtagtctgttgaggattcctatttctccctggttcaatcttggaaggttatgtgtttctaggaatttatccacttcctctaggttttctaatatgtgcatatagtttctgctgatattttatatgtctgtgttatcagttataatatcaccttatcatttctgattgtatttatttgaatcttctttttttcttggttaatctagctagtggtctgtcagttttatctttgcaaagaaccaactttttcttttattgatcttttgcattcctttgttctcagtctcatttttgcctgctctgatatttgttattgcttttcttctgccagctttgggttgagtttgttttgttttttcctagttccttgagatgtgacgttaggctattcatttgagatttttctatctttttggtgtaggcatttaatgctataaaatcctctcttagcactgcttttgctgtatctcagatgttttcatgtgttttgtctctattttcatttatttcaaaaaattttaaatttccaccttagtttcatcattgatccaaaaatcattcaggagcaagctgtttaaattccatgtatctgttttgagagttcctcttggtattgatatctagttttattccactatggtcagagaagatgttagatatgattttgtttttttaaaatttattgatacttgctttgtggtccagtatatgacctatttttgagaatgttccatgcacagaagagaagagtatatattctgtggttgttgggtagaatgttcttcagatgtctgttgggtccatttggtgtagagtccaatttaagtccagagtttctttgttgatttctgtcccagtgatctgtctagtgctgtcaatggagtggtgaagtcccctgctattgttgtattgctgtctatctcttttcttaggtctagtagtatctgtgttatggatctgggtgttgcagtgttgggtgcatacatatttaggattgttttatcttcttgttgaatttatcctttatcattataaatgaccttctttgtcctttttaatttttgttggtataaagtctgttttggccatcacggtggctcacgtctgtaatcccagcactttgggaggctgaggcgggcagatcacttgaagtcaggagttcaagaccagcctggccaacatggtgaaaccccgtcgctactaaaaatacaaaaaaaaaaaaaaaaaaaattagccgggcatggtggcgcatgcctgtaatcccaactacttgagaggctgaggcacaagaatcgcttgaactcaggagctggaggttgcagtgagctgagatcacaccactgcactccagcctgggcaacagagcgagactctgtctcaaaataaaataaaataaaataaatttgactaacaacttatgtataaaaggaaattacaaatatattagacaaaatcattctaacagggtattatgggttgaactgtatcccctaaaaagatatgctgaagtcctaacccctggtaccggtaaatgtgaccttacttggaaacagggtcttggcagatataatcaagttaagatgaggtcaccaggtaaccccaatctaacctgactggtgtccaaataaaagacatacacagagatacacagcgagaatgcaatgtgaagatggaggcagagattggaatggtgtatgtaaaagccatggaatgccaaggactgccagctgttaacagaggttaggaaaaaggcatagaacagatcctcagagtcctcagaaggaaccaaaacgatcagcacccttgagtttagatttccaggctctaaactatgagagaataaatttctcttgttttaagccaccaaggttttggtacttggtactttgttatcgtatcgtttaaaaacgaatacataggagaacctttgataatatgtatcctaatttgttctccttacctgttttaaaaaaattattataaaggttaacaaaatggtcttactttactgtcattcaaccagtatgaattccctcatggcgaatgaggtcagagcgactaccaaaagcctttccacattccttacagtcatagggtttctcaccagtgtgaattctctgatgtcgagtaagatttgagcctttattaaaggccttcccacattcattacattcatatggtttttcatctgtatggattctctgatgttgaataagttctgagctctgaataaaggcctttctacattcttcacattcatagagcttctcaccagcatgaattctgtgatggttagtaagtgttgaggcactattaaaggccttcccacactgcttacattcataaggtttctcaccagtatgcattctctgatgctgaataagccttgagtgttgagtaaaggctttcccacattctttacattcataaggtttctcaccagtatgaattctcagatgtagaaaaagttgtgaacttttagtaaaggcttttccacatactttacattcatagggtttctcaccagtgtgaattctctgatgatcattaaggtttgagcaatacttaaaggcttttccacattccttacattcatagggtttctcaccagtgtgaatcctctgatgttgagaaaaatatgaactacaactaaaagccttgccacattccttacattcatagggttttttaccagtgtgaatcctctgatgtcgagtaacgagtgagccacgactaaaggacttcccatactccttagattcatagtgtttttcaccaaaatgaattctctgatgttggataaattgtgagttttgattaaaggtctttccacatatcttacattcccatggtttctcttcactcatagttttttgaggtggaataagaaatgtgggctgaataaaagtagacatgtcttcacgggtaattattacttgactgaaatgtctcttctttagagataatattttggtctcacacattgattccagatctgaaagaaaatacaaaggcaaataaattttcctattctgggcaagttaaaacttctaaaaaagaaatgggagaattaaactgaaaagaatatctgagaaattacacagttttcaaaggtggagaggcaatctgtaaaactgacaagaaaagcacagacattaggagaggtaataaaagaagctgaggatgtggattcagaaagtagatgacctctatgatcctcaaattttggtctgaaccagagtcaccttaagccttggtgaatacacagtgttcagcaccatcctccatattatagagagattctaattaaaaaaaaaaaattttttttgcccccaccccagatcccccacaggcgctgcctgagacccagctctgtgtctcctcgtcgtacagcttgtggagctccgactgcaaggccatcagcatgcccaggcaggggttaagctggagggccatggaggaggacaggccagcaggatgccgcttctgctccagggcatgcaccatgcgtgagatattctaattatatacacgttcataaacatatgctcacatgcacagagtatgatactgtatgttttgcaattcgtagataactgtcagacctacatgaaaggactgttaagaataacaaatgtgttgaaaggtttaaatgtcgggggcgggtggagttcagtgactgtgcaatggtatactggcaaatcaccagcctccgacaaatctaatatgctgaacacaactggtgggaagagtagacaggtacatctcttctgtgcatacagcatgatatgggctaggaactcactgaaaataatttgctctggaattctgtgatgttgaccttgggagaaagaaatgaataattcaagtcatagcagtgattgagaaggaaggtggctcaagtttgagacacaagagagttaagataggatgaaatgtactctatgagaagaatggaactccatgtcaacatataaacagtgagccccagttctatgctttaaggcaacctctgagccctcttttccttgtttattaaaatgggactgacacttaacttatgattgctaaaaagatgaggaataacgtatataaataatctgatataaagtaagcactcagtattggtagctattattatgaaaaaatgtcatagcaaaaacagatattgggcaaataaaatggcttgaagacatcaaaataaagccagctagactatcttaagtattccctccacacaatcattggccaaacttagtctgggtgagtccctaaaaatctcttaaagttgtcctcatttaattactgaatcccctctttcctagaccactacaggaatctcctaatggtttccccagtatgttctagcaccctctaatccattcagcacctggtgtgatatttggtctcactttgccctcctgaaaatctaaactccttggtaattaccaagaagactccaataatgaggctcttgcctacctctacaaccttgtgttatactccacttccacttgctcaagaagccccagtccttcaagcacctcaagttctccctgcccctcagggccttcccacatggatctcccctttacctggcatacccctcatcctatcaccattgttggccctgctaacaatgagaaaagcctcatcacagcttccactaacaaccaagccctaagccactgaggaactcacagacactgctgacactgattgcagccagagaaatcatatggagattataccactgcatccacctataacaaagccaaagcaacctacccaaccaacactataaatacatctacaggaaaaaggttttccttatgaaaacaaatccataaaattggaaaaaatgaccataacaagaaatacacagatatcaatgtaaggataaaagaaacacgaaaaagcatggaaccatgacatctccaaagtaatacaataatgctccagcaacagattccaacaaacaagaaatctatcaagtgcctgaaaaagaattcaaaataatgatattaaagaagctcagtgggaaacaatagaacatggataaaaaccaaaagaatcagaaaaaacaattcatgatctgaatgagaaattcagcagatagatatcatgaaaaagaaccaaacagaagtcctgaaactgacaaatttcaatgaatgaaataaaaaacacaattgagagcttcaacaatagactagatcaagcagaagaaagaatttctgaacttgaggacagggttttttaaaagaatccaggaagaaaaagtaaaaaataataatttttaaaactgaaaaaagcttagatgacatatgggacatcataaagcaaccaaatattcaaattttgggtattctaggagaagagatgggcaaaggcataaaaacctatttaacaaaataactgaaaactttccaagtcttgtaagcaatatagacatcctgatacagaaggctcaatgatgcccaaatagattcaatccaaaaaggttttccaaggcccattacagtcaaactgtcaaaagtcaaagacagagaattctaaaaaaagcaagagaaaggcatcaagtcacatataagggaaccctcaggcgtcaagtcacatacaagggaaccctcatcagaactagtagcagataccttggcagaaaccttccatgccaggaaagaatgggatgatatattcaaagtgctaaaaaaacactgtcagccaagaatactgtacctagcaaagccatccttcaaaaatgaaggagaaagtttttcccagagaaaatgtatcacaactagggtggcccgatcaaaaatggcaaagggtgtcctacatctggaagtaaaagacatatctaccatcattaaacaaatgaaaataagaagctcactggtagagcagatacacaaatggaaagagaaaggactcagatgtaaccattacataaaaccaccaaaccaaatgataagaggaaagaaaaaggatataaaacaaccataaaaaattaacagattaggaataaatcctcacctattaataataaccttgaatgtaaacagtcaaattccccacttaaaagatacagtctggttgaatggataaaataaatatgactcacctatatactggctgtgagaaactcactttatatataaaatcatagactgaaagtgaagagatgaaaaaaaaatactgcacacaaacaaaccaaaagcaagtgagagtagccatacttaaataaaacagacattaagtaaaaaactgcaaaagaagcaaagaaggtcattatataatgataaatgggtcaattcagccagaggatataaagttctaaatttataggcactcaacactgcagcacccagatatataagcaaatattattagatctaaaaagagagatagggctgggcatggtggctcatgcctgtaatcccaacactttgggaggccaaggcgggaggatcacttgaggtcaggagttcgagaccagccttcccaacatgacgaaaccctgtct[131 bp omitted]gaaacctcgtctctactaaaaatacaaaaaattagccaggcatggtggcaggcacctgtagtcccacctactcgggaggctgaggcaggagaatggtgtgaacctgggagacggagcctgaagtgagccgggttcgcaccactgcactccagcttgggtgacagagcaagactgtcaaaaaaaaaaaaagaaagaaaaaaaaattagctgggcgtggtggcatgcacctgtaatccgagctactcaggaggctgaggcaggagaattgcttgaacctgggaggcagaggttgcagtgagccaatattgtgccactgcactccagcctgggcgacggaactagactctgtctcaaaaaaacaacaacaaaaaaaggtagactcccataaaataatagtacgggatttgaacatcccactctcagcattagacagttcatctagatagaaaatcaacagctttggatttaaactggatattagaccaaatggacctaccagacactaactgaacattttatccaacagctgcagaatacacattgttcctatcagcacatggaacatcctccaggaagagaccatacgttaggccataagacaagttataactaatttttaaaaattgaaatcatatcaagtatcttctcagactacactagaataaaactagaaatcaataacaaaaactttgtaaaccacacaaataaatggaaatttaaacaatgtgcttgctcatgaatgcccattgggtcaattaagaaattaaagatcatcaaagactactacaggcaactatatgctaacaaatcagataacctagaggaaacagaaaaattcctggatacatgaaaacctaccaagactgaaccaggaagaaacagagcagaagaacctgagcagaccaataacgagtaatgagattgaagcaatagtaaaatgtctcccaacaaaaaaagcccaagactaaagggctttactgctgaatcctaccaaaattacaaataactaacctcagtttttctcaaactattccaaaaaatggaagagaagttaattcttcctaatccattctacaaggccagcattaccctgataccaaaaccagagaaggacacaacaacaacaacaaaaagaggtgatatccctcatgaacatagacacaaaacccctcaatgaaatactagcaaatgaaatccaataatacaacaacaagataatatacaacgattaagtgagatttttcctgaaaagtgcaaggatggctcaacataagcaaatcaataaacatgatgtatcagatcaacaggatgagggataaaaaccatatgatcagctcaatagatgcagagaaacatctgataaacttcaacgtctcttcattataaaaacctctcaacgattaggcattaaaaaacataacataataaagaccatatatgacaaacgtacagctaacaccatactgaatggggaaaagccgaaagcttttcctctaagaactggaacaagataaagaagcccacattcaccactattattcaatatagtactggaagtcctatccagagcaatcaggcaagagaaagaaataaaaggcatccagattggataatagaaagtcacactgtccctttacagatgacatgatcttacatatatttaaaaacctaaagatgccaccagaaattcttggaactgatcaatgaaatcagtaaagttgcaagatacaaaatcaatatacaaaaataagtagtacgctgggcacggtggctcacgcctataatcccagcagtttggaaggccgaggtgggtggatcacttgaggtcacgagtttgagaccagcctggccaacatggtgaaaccttgtcttgactaaaaatacaaaaattggccaggtgtggtggcaggcacctgtggtcccacctacgtgggaggctgaggcagaactgcttgaacccaggaggtggaagctgcagagagctgagatcatgccattgcactcctccagcctgggagacagagcaaaactctgtctcaaaaagggaaaaaaaaaggatttctatacatccacaataatgaattagctgaaaaagaaatcaagaaaacaatcccatttattaatataatagctacaaaaaacaacctagaaataaatttaaccatgaagtgaaagacctctgtaaggaaaactacaaaacacagacaaaagaaattgaagacaacaaacaaataaaaagatatttgcatgcttatgcactggaagaactattgttaaaatgaacatacttcccaaagcaatctacagattcaatgcaatctacagattcaatgcaatcccgactgaaatgccagtcagtttttacatgaacaggaaaaaaaatcctaaaatttgtaggaaaccataaaaaatgccaaatagccaatgcaatctgtagcgaaagaacaaaagtggaagaatcaaacttcaaaatatactacaaagctgtcgtaaccaaaacagcatggtactgtcataaaaatagacccaaagaccaatggaacagaagagagaacccacaaataaatccatgtatttatagtcaactgatggttgacaaaggtgccaagaacagacatagggaaaaggacacgctgttcaataaatggtgctgggaaaactggttatccatatagtgaagaatgaaactagactgtatctctcaccatatacaaaaataaactcaaaatgaattaaatacttaactataagaccccaaattataaaactactgcaggaaaacataggggaaacacttcagaagaataggcaaatatattttagataagacctcaaagatattttcaataaggggcaacaacaaaaaaatagacaaattggactatattgaactaaaatgcttctgcacagcaaaggaaacaatcagcagagtgaagagacctgtagaatgggagaaaatatttgcaaactcttcacctgagaagggactaatatccagaattaacaaggaagcaaaaaaacttaatagcagtgccatagcggctcataactgtaatcccagcacattgggaggccaagtcaggaggatcacttgaggccaggagttcaagaccagcctggggaacatagggagaccccccccgatctctataaacagttttaaaattagctaggtatagtggcatgcacctgcagtcttagctacttaggaggctgaggtggtagaatcacttgagcctgggagttcaaggatgcggtgagctgtgatcaggccactgcactccagtctggctgacagtgaaactctctcacatacacaaaaaatgacactgggtacattctattagtaaaagaaaaaaaaatacatatatatatatgtatgtataaaacaattgataaatattcaaagtgatgggtatctaaataccttgatttgatccttatacgttgtatgaatgtatcaatatattgcttgtgctccataaatatgtataatttgtatcgataaaaactaaaaaaaaagctcatgagaaatctaatgtatagcaggaggactatagttagtaatactctattgtatactagaaatttgtcaggaaagtaggttttaagtactcttaccctaaacaaaaaaaaaaagaaagaagaaaagattatagttatttgataggatctgcttaactatagtaattatttcaatatgtatgtgtatcaaaacatcatgttgtacacctagaatttatacaataatttttaaaaaaaggttcatataaaaatttttttttaaacacatataaaaatagaaagaatgagtaacacttagtatttgctagcaaaacagggtgactgtagtcaaaaataatttaattgaacatttaaaaataactaaaagaggctgggcatggtggctcatgtctgtaatcccagcactttgggaggccaaggtgggtggatcacttgaggtccggagttcaagaccagcctggccaacatggtaaaactctgtctctactaaacacacacacacacacacacacacacacacacacacacacacacacacacacaaatttgctgggcgtggtggtatgtgcctgtagtccaaactacttgggaggctgaggcatgagaatcacttgaacctgggaggcagaagttgcagtgagcagagatcacagcactgcagcactgcacttcagcctgggtgacagagtgagactctgtcttaaaaaaaaaaaaaaaaattcccctaaaaactaagagtacaataagattgtaacacaaaggataaatgcttcaggtgatagatatcccatttctcctgatataagcattgcctgcctgtatcaaaatctcatgtaacccataaatatacatacctactatgtacccaaaaaattaaaaataaagattaataaataaataaaaacaaccaggccaagtgtggtggctcactcctgtaatcccagcactttggagggctgaggcaggtggatcacttgaaatcaggagttcaagaccagcctggccaacatgttgaaacctcatctctactaaaaatacaaaaattagctgggtgtggtggcatgagcatgtaatcccagctacgcaggaggctgaggcaagggaattgcttgaacccaggaggtggaggttgcagtaagccaagattgtgccattgcactccagactgggcaacagagcgagactgtctcagaaaaaaaaaaaaaaaaaaaagataacaagtgttagcaaatgatgtggagaaactggaaccatcatacactgctggtgggcatgtaaaatggtgcagccaatttggaaaagagtctagcagttcctcaactggctaaacacagagttatgatatgacccagcaattctactcctaggtagaaacctgaaagaactgaaagcttatgtccacacaaaaacttatagacatgttcatacaacattaatcaaaatagcccaaaagaggaaacccaaatgtccatcaactgatcaatggataaatgtgctatatccataaaatggaatagtatttggcaataaaaaggaatgaaatgctgatacatgctacaacacggatgaaccctgaaaagcattaagttatgaaatagggaatttgcagaagaccacatattgtacaattccatttatatgaaatgtccagaataggcaaatccatagagaaaatcaactcatggttgcctggggctggagggggtgggaataacagctagagtgtacagggatttttctgaggtgataaaaatgttctaaaattgattatggtgatggttatacaactctattacattaaaaatcactgaattgtacattttatgtgggtgaactatatggtatgtgaattataccttaataaagctgaaaataaaacaacaaaattaaaggagtgctactctggttcatagcgagcaggggttgggcaactttttaaataaagaataagatagcaaatattttcagctttgtgggctatccaagtgtgtgattgtagtgcaaagacagtcacagaaaacttctagtagtttgaatgtgctagccttaaaaaataaacaagtctttccaacttggatccggcagaatggctcccacaaagaagggtggtgagaagaaaaagggccgttctgccatccacaaggtggtgacctgagaatacaccatcagtatgcacaagcgcatccatggagtgggcttcaagaagcgtgcccctcggacactcaaagagattcagaaatttgccatgaaggagatgggaactccagatgtgcgcactgataccaggctcaacaaagctgtctgggccaaaggaataaggaatgtcccataacgaatccatgtgcggttgtccagaatacgtaatggggatgaagattcaccaaataaactctatactttggttatctatgtatctgttaccactttcaaaaatctacagacagtcaatgtggatgagaactaatcactgattgtcaaatacatcaaatagttataaaattgcaaaaaaaaaagaaaaaaaaaaacaagtacccccccgcaccccgcaaaaataaccccacaacctcacaagaactgctagctcaaaaacagaaatttttaaaaagactggcttaataattctggtttaaaaatagctatacatcttcctcctgattt[136 bp omitted]catggcaaaatcccatctctacaaaaaatacaaaaattagccggtcatggtgccgtgcacctgtagtcccagctactagggagactgaggtgggagggtcacttaagcctgggagaggcgggtgtggtggaggttgtagtgagccaagatgcaccactgcactccagcctgggcaacagagccagactctgtctcaaaataaaataaaataaaataaaataaaataataaaaactatacaattatgtgttaaaccaaatcaaattatagttctgtcagactttttgacatccaagtaactgttgggccgggtgcagtggctcacgcctataatcccagcactttgggaggccaaggcgggtggattacttgaggtgaggagttagagaccaacctgggcaacatggtgaaaccccgtctctactaaaaatacaaaaattagctggacatggtggcgcacgcctgtaatcccagctacttgggaagctgaggcaggagaatcgcttgaacccgggaggcggaggttgtagtgagccgagatcacgccattgcactccagcctgggcgacagagcgaatctccatctcaaaaataaaaaagaagaagaagaaaaaaagtaactgtgttgctctgtagtgtgtcagtttaaatacagtagtcaagatttttagtcaacttcaagaaaatggacattaagtaagaaaaattaatagataatcctcgaaaacctggatgatttctaacataaggtattaaaacattgatttctaagaatagttttaacaaatatgccattattatttaatatgtatgccttgttttttatgttagaggatggctatacctttgggtaatataaataaatacatgtggttttgttttgttttgtttttgggtcaagggtaattttagttatagtatgtgcagggcacaaatgtgcaaaagggcatttctgtcctttttataaaggcttataaggaatgtgggtggctattgggggagtggtatcacatgtcaggagtctgttaaaatgtttatatatcacagttctcaattacctacctcccacatctttctttataatttgagtagttgagactatctgggaataatcataacagaaatgtaatagatatgcttttgttatcaaggaaattataggttgggcacggcggctcagacctgtaatcccagcactttgggaggccaaggtgggtggaacacctgaagtcaggaattcgagaccatcctggccaacatggggaaacctcgtctctactaaaaataaaaaaattagccgggcatggtggcaggtgcctctaatcccagctactcgggaggctgaagcagaggttgcagtgagctgaggttgcaccactgcactccagcctgggcaacaagagtaaaactgtctcgaaaaaaaaaataacaatagttttgtcttaaaaaaaccaattgttccaaaatgtaaaactgatacataaaaaagacatctcagttttgatgggtttattttcaatccagtatttgaacttgggaagaatatgtaaaaacactcctaagtgactattattaagcaaagatatgaaaatagaaagtacaaactacaatacaaataaacataaggcataacaccaatggggatgcacattaagtaggtaacaggaaagttataacaacatttgtgtaatcaggatataaactatgaatatattgctataggcaagatacatacagtgattacgagagaccagccctcaactatcagaaaaagacatcaagaaatacttttatagtttgatgtatcacagaaagacaaaacatactatgcaaaatttgaaggtaggtatcagaagaatgaaagtaagagttgaaaatgtattatctttgatgagagggactggggcagtcatggtaggaatgtatatgtgaaaaagcaggctgctgtttttcttttttctctttttttgagatggagtcttgctctgttgcccaggctggagtgcagttgcatgatctcagctcactgcaacttccacctcctgggttcaagcgattctcctgccttggcctcccaagtagctgggactacgggcgcctgccactatgcccggttaatttttgtatttttagtagagacggggttttgccatgttggccaggctggtttcgaactcctgacctcaagtgatctgcccgcctcggcctcccaggtgctgggtttacaggtgtgagccaccgcgcctggtctgggctgctgtttttcaatataagctttataacactgtgatttcaaactctgtaaatatattactttaatgaaaattaattattttaaaatgaaaaaggaataaacagagaccacctttcaagtacaaaggtacaaggttaaggtaagattaagaagggggtgaattagcaagttggtagggaggaaaagtggtaggagagacagaaataaaaatacttgaaggcagctaagatcaactgatagctgggaaaaagtgaagattcacaaactcctccctaggttcctagagctttgttaaatctagaattctttctcaagggacacatggatcttctatttccaacgctaactccataggtaacaacatctacttctagggctccaaccattaacttctacttggatcaatttccacttccatattttttgactgttttacaactttcttctgagcgtcctatttgatcttctcattgatgaatcttatcctgtagaaattatttacagcaatgttctagctcctacattagataacaagtttcttaataagcctacacattttctaaactgtacagcacctagcagactagtgtataaaattaaaaagtcaaacatttttataagacttgctatttaaaaatcttaattctccacaaactgatattaatattctcatgaaaaaataacttggcattttgattaagtttcaaatgactatataagctaattctaaattttttttttttttcttttgtgagaccaagttttgctcttgtcccccaggctggagtgcaatggtgtgatctcggctcactgcaacctccgcctccctggttcaagcgattctcctgcctcagcctcctgagtagctgggattacaggtgcccgccaccacacctggctaatttttgtatttttagtaaagatggggtttcaccatg[136 bp omitted]agcagcaggagaacttgctctactagataagatttattacatgctacagtattaatatagtgtggtattggcacaaggatagacaaataagccaaaggaacagaattcagagatagactcacagaaataggaatacctgatttatgacaaaggtagtcctatttctattggggaaaagatagatatagtcctatctctatagaatgggaaaaggacagtcatctcaataaacactaagaagtcaactggatattcacatggaaaaaaaatgaaatttgacccctacctcacaacacatacaaataccaacttcaggaaagtagatctaaatggaaaaagtaaaacaataaagctactagaatataacataggaaatatcttcaagaccttggggtaggcaatgattcctatccaggacacaaaaaagcaacactataaagaaaaagataactgtgaccacattaaaattaataacttctgttcatcaaaaggtactattaaaagagtaaagggcaaggtataaagtggtgggagatatttacatcatgtataaccaaacacagggctgatacatagaatataataagaattctttgaaaccaacaggaaaaagatagacaaccgactaagtttagccaagaaacttaaacaggcatgtcacagaacacacacatcagaataactaaaattaaagggcctggcaataataactggtaagaatgtaagaatgcagagcaatagtaaccttcatactgctagtagaactgcaaattggtataactactttggaaaattggtatatttactaaagttgaacacacacatatcctattgctcagtaattccactcctatgtatatacctaaaagaaatgtgtacatacatttaccaaaagttatacacaggaacgttcacagcagcattatgtttaatagctaaaaactgcaaacaaaccaactgtcaacagaaggacacttatagtaattaataatatat[133 bp omitted]ttgaaaccctgtctctactaaaaatacaaaaaattagctgggcgtggtggcgcaggcctgtagttccagctactcgggaggctgagacaggagaatcgcttgaacccaggaggcagaggttgcagtgagctgagatcacaccactgcactccagcctgggcaacagagcaagactccatctcaaaaaaaaaaaaaaaaaaaaaaaatgtatatatatatatatatgtatatattcatagaatgaaatataacatagccaataagaatgaactaacaccagatatatgcagcaccatagatatgtcacataaacataatgttgagcaaaaaaagccaaaggcaaaagactaaatactgtgtgattgcgtctatacaaagttcaaaaataggcaaaacgaatccatggtgccaaatgtcaggatggtatttattttgagagaggaaaaagaggctggtgattgggaaggggcagagaaggggttctga
